(19) United States
(12) Patent Application Publication
(10) Pub. No.: US 2018/0271795 A1
(43) Pub. Date: Sep. 27, 2018

(54) POLYNUCLEOTIDES ENCODING METHYLMALONYL-CoA MUTASE

(71) Applicant: ModernaTX, Inc., Cambridge, MA (US)

(72) Inventors: Paolo Martini, Boston, MA (US); Vladimir Presnyak, Cambridge, MA (US)

(21) Appl. No.: 16/002,376

(22) Filed: Jun. 7, 2018

Related U.S. Application Data
(63) Continuation of application No. PCT/US2016/067393, filed on Dec. 16, 2016.
(60) Provisional application No. 62/409,343, filed on Oct. 17, 2016.
(60) Provisional application No. 62/338,456, filed on May 18, 2016.
(60) Provisional application No. 62/338,478, filed on May 18, 2016.
(60) Provisional application No. 62/274,726, filed on Jan. 4, 2016.
(60) Provisional application No. 62/274,722, filed on Jan. 4, 2016.
(60) Provisional application No. 62/274,733, filed on Jan. 4, 2016.
(60) Provisional application No. 62/274,727, filed on Jan. 4, 2016.
(60) Provisional application No. 62/273,108, filed on Dec. 30, 2015.
(60) Provisional application No. 62/273,112, filed on Dec. 30, 2015.
(60) Provisional application No. 62/269,092, filed on Dec. 17, 2015.
(60) Provisional application No. 62/269,089, filed on Dec. 17, 2015.

(51) Int. Cl. A61K 9/51; A61P 3/00; C12N 9/90

(52) U.S. Cl. CPC A61K 9/5123; C12Y 504/99002; A61K 38/00; C12N 9/90; A61P 3/00

(57) ABSTRACT

The disclosure relates to polynucleotides comprising an open reading frame of linked nucleosides encoding human methylmalonyl-CoA mutase precursor, human methylmalonyl-CoA mutase (MCM) mature form, or functional fragments thereof. In some embodiments, the disclosure includes methods of treating methylmalonic acidemia in a subject in need thereof comprising administering an mRNA encoding an MCM polypeptide.

### BACKGROUND OF THE DISCLOSURE

[0001] Methylmalonic acidemia (MMA) is a metabolic disorder characterized by the abnormal buildup of the metabolic byproduct methylmalonic acid in patients. MMA causes developmental delay, intellectual disability, kidney disease, coma, or even death. MMA is also referred to as methylmalonic aciduria. It has an estimated incidence of 1 in 50,000 to 100,000. Current treatment for MMA is primarily via dietary control to limit the usage of metabolic pathways that lead to methylmalonic acid formation. In serious cases, kidney and liver transplants have also been performed to provide a new reservoir of cells that can properly metabolize and remove the methylmalonic acid. However, none of these treatments completely or reliably controls the disorder. As such there is a need for improved therapy to treat MMA.

[0002] The principal gene associated with MMA is methylmalonyl-CoA mutase (NM 000255; NP 000246; also referred to as MCM or MUT). MCM is a metabolic enzyme (E.C. 5.4.99.2) that plays a critical role in the catabolism of various amino acids, fatty acids, and cholesterol. MCM's biological function is to isomerize L-methylmalonyl-CoA into succinyl-CoA, a Krebs cycle intermediate. MCM localizes to the mitochondria of cells, exists as a homodimer in its native form and is adenosylcobalamin-dependent. The precursor form of human MCM is 750 amino acids, while its mature form is 718 amino acids—a 32 amino acid leader sequence is cleaved off by mitochondrial importation and processing machinery. This leader sequence is variously referred to as MCM's mitochondrial targeting peptide, mitochondrial targeting sequence, or mitochondrial transit peptide.

[0003] A complete or partial loss of MCM function leads to buildup of abnormal metabolites and metabolic intermediates upstream of MCM, such as methylmalonic acid, propionyl-carnitine, acetyl-carnitine, propionyl-CoA, D-methylmalonyl-CoA and L-methylmalonyl-CoA. For example, loss of MCM has been reported to lead to a 1000-fold increase in the methylmalonic acid. Nonetheless, there is no currently available therapeutic to treat MMA.

### SUMMARY OF THE DISCLOSURE

[0004] The present disclosure provides methods of treating methylmalonic acidemia in a subject, the methods comprising administering to the subject an effective amount of a polynucleotide comprising an mRNA encoding an MCM polypeptide, wherein the administration alleviates the symptoms of methylmalonic acidemia in the subject. The present disclosure also provides compositions comprising a polynucleotide sequence encoding an MCM polypeptide. In some embodiments, the compositions include a delivery agent.

[0005] In some embodiments, the composition comprises a polynucleotide that comprises an open reading frame (ORF) encoding an MCM polypeptide and a delivery agent, wherein the delivery agent comprises a compound having the formula (I)

[chemical structure]

[0006] or a salt or stereoisomer thereof, wherein

[0007] R₁ is selected from the group consisting of C₅₋₂₀ alkyl, C₅₋₂₀ alkenyl, —R*YR″, —YR″, and —R″M′R′;

[0008] R₂ and R₃ are independently selected from the group consisting of H, C₁₋₁₄ alkyl, C₂₋₁₄ alkenyl, —R*YR″, —YR″, and —R*OR″, or R₂ and R₃, together with the atom to which they are attached, form a heterocycle or carbocycle;

[0009] R₄ is selected from the group consisting of a C₃₋₆ carbocycle, —(CH₂)ₙQ, —(CH₂)ₙCHQR,

[0010] —CHQR, —CQ(R)₂, and unsubstituted C₁₋₆ alkyl, where Q is selected from a carbocycle, heterocycle,

—OR, —O(CH₂)ₙN(R)₂, —C(O)OR, —OC(O)R, —CX₃, —CX₂H, —CXH₂, —CN, —N(R)₂, —C(O)N(R)₂, —N(R)C(O)R, —N(R)S(O)₂R, —N(R)C(O)N(R)₂, —N(R)C(S)N(R)₂, and —C(R)N(R)₂C(O)OR, and each n is independently selected from 1, 2, 3, 4, and 5;

[0011] each R₅ is independently selected from the group consisting of C₁₋₃ alkyl, C₂₋₃ alkenyl, and H;

[0012] each R₆ is independently selected from the group consisting of C₁₋₃ alkyl, C₂₋₃ alkenyl, and H;

[0013] M and M′ are independently selected from —C(O)O—, —OC(O)—, —C(O)N(R′)—,

[0014] —N(R′)C(O)—, —C(O)—, —C(S)—, —C(S)S—, —SC(S)—, —CH(OH)—, —P(O)(OR′)O—, —S(O)₂—, an aryl group, and a heteroaryl group;

[0015] R₇ is selected from the group consisting of C₁₋₃ alkyl, C₂₋₃ alkenyl, and H;

[0016] each R is independently selected from the group consisting of C₁₋₃ alkyl, C₂₋₃ alkenyl, and H;

[0017] each R′ is independently selected from the group consisting of C₁₋₁₈ alkyl, C₂₋₁₈ alkenyl, —R*YR″, —YR″, and H;

[0018] each R″ is independently selected from the group consisting of C₃₋₁₄ alkyl and C₃₋₁₄ alkenyl;

[0019] each R* is independently selected from the group consisting of C₁₋₁₂ alkyl and C₂₋₁₂ alkenyl;

[0020] each Y is independently a C₃₋₆ carbocycle;

[0021] each X is independently selected from the group consisting of F, Cl, Br, and I; and

[0022] m is selected from 5, 6, 7, 8, 9, 10, 11, 12, and 13; and provided when R₄ is —(CH₂)ₙQ, —(CH₂)ₙCHQR, —CHQR, or —CQ(R)₂, then (i) Q is not —N(R)₂ when n is 1, 2, 3, 4 or 5, or (ii) Q is not 5, 6, or 7-membered heterocycloalkyl when n is 1 or 2.

[0023] In some embodiments, the delivery agent further comprises a phospholipid, a structural lipid, a PEG lipid, or any combination thereof.

[0024] In some embodiments, the polynucleotides comprise an ORF having significant sequence similarity to a polynucleotide selected from the group of SEQ ID NOs: 1-207, 732-765, and 772, wherein the ORF encodes an MCM polypeptide. In some embodiments, the polynucleotides comprise an ORF having significant sequence similarity to a polynucleotide selected from the group of SEQ ID NOs: 151, 152, 153, 154, 732, 733, and 734 (FIGS. 9-15), wherein the ORF encodes an MCM polypeptide. In some embodiments, the polynucleotide comprises an ORF having significant sequence similarity to SEQ ID NO: 734 (FIG. 11), wherein the ORF encodes an MCM polypeptide.

[0025] In some embodiments, the disclosure is directed to a polynucleotide comprising an ORF having at least 99% or 100% sequence identity to nucleotide 97 to nucleotide 2250 of SEQ ID NO: 734, wherein the ORF encodes an MCM polypeptide.

[0026] In some embodiments, the disclosure is directed to a polynucleotide comprising an ORF sequence having at least 98%, at least 99%, or 100% sequence identity to nucleotide 97 to nucleotide 2250 of SEQ ID NO: 732, wherein the ORF encodes an MCM polypeptide.

[0027] In some embodiments, the disclosure is directed to a polynucleotide comprising an ORF having at least 92%, at least 93%, at least 94%, at least 95%, at least 96%, at least 97%, at least 98%, at least 99%, or 100% sequence identity to a sequence selected from the group consisting of nucleotides 97 to nucleotides 2250 of SEQ ID NOs: 182, 733, and 741, wherein the ORF encodes an MCM polypeptide.

[0028] In some embodiments, the disclosure is directed to a polynucleotide comprising an ORF having at least 91%, at least 92%, at least 93%, at least 94%, at least 95%, at least 96%, at least 97%, at least 98%, at least 99%, or 100% sequence identity to a sequence selected from the group consisting of nucleotides 97 to nucleotides 2250 of SEQ ID NOs: 735, 736, 738, 743, 744, 748, 749, 750, 754, 755, 758, 762, and 765, wherein the ORF encodes an MCM polypeptide.

[0029] In some embodiments, the disclosure is directed to a polynucleotide comprising an ORF sequence having at least 90%, at least 91%, at least 92%, at least 93%, at least 94%, at least 95%, at least 96%, at least 97%, at least 98%, at least 99%, or 100% sequence identity to a sequence selected from the group consisting of nucleotides 97 to nucleotides 2250 of SEQ ID NOs: 180, 187, 737, 739, 740, 742, 745, 746, 747, 751, 752, 753, 757, 759, 760, 761, 763, and 764, wherein the ORF encodes an MCM polypeptide.

[0030] In some embodiments, the disclosure is directed to a polynucleotide comprising an ORF having at least 89%, at least 90%, at least 91%, at least 92%, at least 93%, at least 94%, at least 95%, at least 96%, at least 97%, at least 98%, at least 99%, or 100% sequence identity to a sequence selected from the group consisting of nucleotides 97 to nucleotides 2250 of SEQ ID NO: 181 and 756, wherein the ORF encodes an MCM polypeptide.

[0031] In some embodiments, the disclosure is directed to a polynucleotide comprising an ORF having at least 88%, at least 89%, at least 90%, at least 91%, at least 92%, at least 93%, at least 94%, at least 95%, at least 96%, at least 97%, at least 98%, at least 99%, or 100% sequence identity to a sequence selected from the group consisting of nucleotides 97 to nucleotides 2250 of SEQ ID NO: 154, 165, 171, 173, and 175, wherein the ORF encodes an MCM polypeptide.

[0032] In some embodiments, the disclosure is directed to a polynucleotide comprising an ORF having at least 87%, at least 88%, at least 89%, at least 90%, at least 91%, at least 92%, at least 93%, at least 94%, at least 95%, at least 96%, at least 97%, at least 98%, at least 99%, or 100% sequence identity to a sequence selected from the group consisting of nucleotides 97 to nucleotides 2250 of SEQ ID NO: 151, 152, 153, 163, 164, 166, 167, 168, 169, 170, 172, 177, 178, 179, 195, and 204, wherein the ORF encodes an MCM polypeptide.

[0033] In some embodiments, the disclosure is directed to a polynucleotide comprising an ORF having at least 86%, at least 87%, at least 88%, at least 89%, at least 90%, at least 91%, at least 92%, at least 93%, at least 94%, at least 95%, at least 96%, at least 97%, at least 98%, at least 99%, or 100% sequence identity to a sequence selected from the group consisting of nucleotides 97 to nucleotides 2250 of SEQ ID NOs: 156, 157, 158, 159, 160, 161, 162, 174 and 176, wherein the ORF encodes an MCM polypeptide.

[0034] In some embodiments, the disclosure is directed to a polynucleotide comprising an ORF having at least 85%, at least 86%, at least 87%, at least 88%, at least 89%, at least 90%, at least 91%, at least 92%, at least 93%, at least 94%, at least 95%, at least 96%, at least 97%, at least 98%, at least 99%, or 100% sequence identity to a sequence selected from the group consisting of nucleotides 97 to nucleotides 2250 of SEQ ID NOs: 155 and 203, wherein the ORF encodes an MCM polypeptide.

[0035] In some embodiments, the disclosure is directed to a polynucleotide comprising an ORF having at least 82%, at least 83%, at least 84%, at least 85%, at least 86%, at least 87%, at least 88%, at least 89%, at least 90%, at least 91%, at least 92%, at least 93%, at least 94%, at least 95%, at least 96%, at least 97%, at least 98%, at least 99%, or 100% sequence identity to a sequence selected from the group consisting of nucleotides 97 to nucleotides 2250 of SEQ ID NOs: 64, 66, 71, 91, and 128, wherein the ORF encodes an MCM polypeptide.

[0036] In some embodiments, the disclosure is directed to a polynucleotide comprising an ORF having at least 81%, at least 82%, at least 83%, at least 84%, at least 85%, at least 86%, at least 87%, at least 88%, at least 89%, at least 90%, at least 91%, at least 92%, at least 93%, at least 94%, at least 95%, at least 96%, at least 97%, at least 98%, at least 99%, or 100% sequence identity to a sequence selected from the group consisting of nucleotides 97 to nucleotides 2250 of SEQ ID NOs: 9, 11, 18, 19, 21, 22, 23, 24, 32, 33, 37, 39, 40, 44, 45, 47, 50, 51, 52, 55, 57, 61, 65, 70, 79, 84, 86, 88, 90, 92, 98, 100, 115, 117, 126, 129, 135, 136, 137, 144, 148, 150, 184, 190, 191, and 206, wherein the ORF encodes an MCM polypeptide.

[0037] In some embodiments, the disclosure is directed to a polynucleotide comprising an ORF having at least 80%, at least 81%, at least 82%, at least 83%, at least 84%, at least 85%, at least 86%, at least 87%, at least 88%, at least 89%, at least 90%, at least 91%, at least 92%, at least 93%, at least 94%, at least 95%, at least 96%, at least 97%, at least 98%, at least 99%, or 100% sequence identity to a sequence selected from the group consisting of nucleotides 97 to nucleotides 2250 of SEQ ID NOs: 3, 5, 6, 8, 10, 12, 14, 16, 17, 20, 27, 28, 29, 31, 34, 35, 36, 38, 41, 42, 43, 46, 48, 49, 53, 54, 56, 58, 60, 63, 68, 69, 74, 77, 78, 80, 83, 85, 87, 93, 95, 96, 97, 99, 102, 103, 104, 105, 107, 110, 112, 113, 114, 116, 119, 120, 122, 123, 124, 125, 127, 131, 132, 133, 134, 138, 139, 140, 141, 142, 143, 147, 149, 183, 186, 188, 189, 192, 193, 194, 196, 197, 198, 199, 200, 201, 202, 205, and 207, wherein the ORF encodes an MCM polypeptide.

[0038] In some embodiments, the disclosure is directed to a polynucleotide comprising an ORF having at least 79%, at least 80%, at least 81%, at least 82%, at least 83%, at least 84%, at least 85%, at least 86%, at least 87%, at least 88%, at least 89%, at least 90%, at least 91%, at least 92%, at least 93%, at least 94%, at least 95%, at least 96%, at least 97%, at least 98%, at least 99%, or 100% sequence identity to a sequence selected from the group consisting of nucleotides 97 to nucleotides 2250 of SEQ ID NOs: 1, 2, 4, 7, 13, 15, 25, 26, 30, 59, 62, 67, 72, 73, 75, 76, 81, 82, 89, 94, 101, 106, 108, 109, 111, 118, 121, 130, 145, 146, and 185, wherein the ORF encodes an MCM polypeptide.

[0039] In some embodiments, the polynucleotides further comprise a nucleotide sequence encoding a transit peptide, e.g., mitochondrial transit peptide. The mitochondrial transit peptide can be any peptide that facilitates the transport of MCM to mitochondria or localization of MCM in mitochondria. In some embodiments, the polynucleotide comprises a nucleotide sequence encoding a mitochondrial transit peptide selected from the group listed in Table 1 (SEQ ID NOs: 251 to 265). In some embodiments, the polynucleotide comprises a nucleotide sequence encoding a mitochondrial transit peptide selected from the group consisting of SEQ ID NOs: 270 to 719.

[0040] In some embodiments, the disclosure is directed to a polynucleotide comprising an ORF having at least 99% or 100% sequence identity to nucleotide 1 to nucleotide 2250 of SEQ ID NO: 734, wherein the ORF encodes an MCM polypeptide.

[0041] In some embodiments, the disclosure is directed to a polynucleotide comprising an ORF having at least 98%, at least 99%, or 100% sequence identity to nucleotide 1 to nucleotide 2250 of SEQ ID NO: 732, wherein the ORF encodes an MCM polypeptide.

[0042] In some embodiments, the disclosure is directed to a polynucleotide comprising an ORF having at least 92%, at least 93%, at least 94%, at least 95%, at least 96%, at least 97%, at least 98%, at least 99%, or 100% sequence identity to a sequence selected from the group consisting of nucleotides 1 to nucleotides 2250 of SEQ ID NO: 182 and 733, wherein the ORF encodes an MCM polypeptide.

[0043] In some embodiments, the disclosure is directed to a polynucleotide comprising an ORF having at least 91%, at least 92%, at least 93%, at least 94%, at least 95%, at least 96%, at least 97%, at least 98%, at least 99%, or 100% sequence identity to a sequence selected from the group consisting of nucleotides 1 to nucleotides 2250 of SEQ ID NOs: 735, 741, 743, 744, 748, 758, 762, and 765, wherein the ORF encodes an MCM polypeptide.

[0044] In some embodiments, the disclosure is directed to a polynucleotide comprising an ORF having at least 90%, at least 91%, at least 92%, at least 93%, at least 94%, at least 95%, at least 96%, at least 97%, at least 98%, at least 99%, or 100% sequence identity to a sequence selected from the group consisting of nucleotides 1 to nucleotides 2250 of SEQ ID NOs: 180, 181, 736, 738, 739, 740, 742, 746, 747, 749, 750, 751, 752, 753, 754, 755, 757, 759, 760, 761, and 763, wherein the ORF encodes an MCM polypeptide.

[0045] In some embodiments, the disclosure is directed to a polynucleotide comprising an ORF having at least 89%, at least 90%, at least 91%, at least 92%, at least 93%, at least 94%, at least 95%, at least 96%, at least 97%, at least 98%, at least 99%, or 100% sequence identity to a sequence selected from the group consisting of nucleotides 1 to nucleotides 2250 of SEQ ID NO: 745, 756, and 764, wherein the ORF encodes an MCM polypeptide.

[0046] In some embodiments, the disclosure is directed to a polynucleotide comprising an ORF having at least 88%, at least 89%, at least 90%, at least 91%, at least 92%, at least 93%, at least 94%, at least 95%, at least 96%, at least 97%, at least 98%, at least 99%, or 100% sequence identity to a sequence selected from the group consisting of nucleotides 1 to nucleotides 2250 of SEQ ID NO: 154, 165, 171, 173, and 175, wherein the ORF encodes an MCM polypeptide.

[0047] In some embodiments, the disclosure is directed to a polynucleotide comprising an ORF having at least 87%, at least 88%, at least 89%, at least 90%, at least 91%, at least 92%, at least 93%, at least 94%, at least 95%, at least 96%, at least 97%, at least 98%, at least 99%, or 100% sequence identity to a sequence selected from the group consisting of nucleotides 1 to nucleotides 2250 of SEQ ID NO: 151, 152, 153, 163, 166, 167, 168, 169, 170, 172, 177, 178, 179, 187, and 204, wherein the ORF encodes an MCM polypeptide.

[0048] In some embodiments, the disclosure is directed to a polynucleotide comprising an ORF having at least 86%, at least 87%, at least 88%, at least 89%, at least 90%, at least 91%, at least 92%, at least 93%, at least 94%, at least 95%, at least 96%, at least 97%, at least 98%, at least 99%, or 100% sequence identity to a sequence selected from the group consisting of nucleotides 1 to nucleotides 2250 of SEQ ID NO: 156, 157, 158, 159, 160, 162, 164, 174, 176, 195, and 737, wherein the ORF encodes an MCM polypeptide.

[0049] In some embodiments, the disclosure is directed to a polynucleotide comprising an ORF having at least 85%, at least 86%, at least 87%, at least 88%, at least 89%, at least 90%, at least 91%, at least 92%, at least 93%, at least 94%, at least 95%, at least 96%, at least 97%, at least 98%, at least 99%, or 100% sequence identity to a sequence selected from the group consisting of nucleotides 1 to nucleotides 2250 of SEQ ID NOs: 155, 161, and 203, wherein the ORF encodes an MCM polypeptide.

[0050] In some embodiments, the disclosure is directed to a polynucleotide comprising an ORF having at least 82%, at least 83%, at least 84%, at least 85%, at least 86%, at least 87%, at least 88%, at least 89%, at least 90%, at least 91%, at least 92%, at least 93%, at least 94%, at least 95%, at least 96%, at least 97%, at least 98%, at least 99%, or 100% sequence identity to a sequence selected from the group consisting of nucleotides 1 to nucleotides 2250 of SEQ ID NOs: 71 and 128, wherein the ORF encodes an MCM polypeptide.

[0051] In some embodiments, the disclosure is directed to a polynucleotide comprising an ORF having at least 81%, at least 82%, at least 83%, at least 84%, at least 85%, at least 86%, at least 87%, at least 88%, at least 89%, at least 90%, at least 91%, at least 92%, at least 93%, at least 94%, at least 95%, at least 96%, at least 97%, at least 98%, at least 99%, or 100% sequence identity to a sequence selected from the group consisting of nucleotides 1 to nucleotides 2250 of SEQ ID NOs: 4, 6, 8, 9, 11, 19, 22, 23, 24, 32, 33, 37, 40, 44, 45, 47, 51, 61, 64, 65, 66, 79, 84, 86, 90, 91, 92, 100, 101, 112, 115, 117, 126, 129, 135, 136, 146, 148, 184, 190, and 191, wherein the ORF encodes an MCM polypeptide.

[0052] In some embodiments, the disclosure is directed to a polynucleotide comprising an ORF having at least 80%, at least 81%, at least 82%, at least 83%, at least 84%, at least 85%, at least 86%, at least 87%, at least 88%, at least 89%, at least 90%, at least 91%, at least 92%, at least 93%, at least 94%, at least 95%, at least 96%, at least 97%, at least 98%, at least 99%, or 100% sequence identity to a sequence selected from the group consisting of nucleotides 1 to nucleotides 2250 of SEQ ID NOs: 2, 3, 5, 7, 10, 12, 13, 14, 15, 16, 18, 20, 21, 26, 27, 28, 29, 31, 34, 36, 38, 39, 41, 42, 43, 46, 48, 49, 52, 53, 54, 55, 56, 57, 58, 59, 60, 62, 68, 69, 70, 72, 73, 74, 76, 77, 80, 83, 85, 88, 95, 96, 97, 98, 102, 104, 105, 106, 107, 108, 109, 110, 113, 114, 120, 121, 122, 123, 124, 127, 131, 132, 133, 134, 137, 138, 139, 140, 141, 142, 144, 145, 147, 149, 150, 186, 188, 189, 192, 193, 194, 196, 198, 199, 200, 202, 205, 206, and 207, wherein the ORF encodes an MCM polypeptide.

[0053] In some embodiments, the disclosure is directed to a polynucleotide comprising an ORF having at least 79%, at least 80%, at least 81%, at least 82%, at least 83%, at least 84%, at least 85%, at least 86%, at least 87%, at least 88%, at least 89%, at least 90%, at least 91%, at least 92%, at least 93%, at least 94%, at least 95%, at least 96%, at least 97%, at least 98%, at least 99%, or 100% sequence identity to a sequence selected from the group consisting of nucleotides 1 to nucleotides 2250 of SEQ ID NOs: 1, 17, 25, 30, 35, 50, 63, 67, 75, 78, 81, 82, 87, 89, 93, 94, 99, 103, 111, 116, 118, 119, 125, 130, 143, 183, 185, 197, and 201, wherein the ORF encodes an MCM polypeptide.

[0054] In some embodiments, the disclosure is directed to polynucleotides that encode functional MCMs or fragments thereof. In some embodiments, the disclosure provides polynucleotides that encode functional human MCMs (SEQ ID NO: 208, SEQ ID NO: 209, SEQ ID NO: 210, SEQ ID NO: 211, SEQ ID NO: 212, and SEQ ID NO: 213). In some embodiments, the disclosure provides polynucleotides that encode functional MCM polypeptides having at least one point mutation in the MCM sequence, while still retaining MCM enzymatic activity. In some embodiments, the encoded MCM polypeptide comprises one or more of the point mutations V69, T499, H532, A598, and V671, as defined by the polypeptide sequences in SEQ ID NO: 209, SEQ ID NO: 210, SEQ ID NO: 211, SEQ ID NO: 212, and SEQ ID NO: 213, respectively. In some embodiments, the polynucleotides are fully or partially modified (e.g., chemically and/or structurally) in a manner as to avoid the deficiencies of other molecules of the art. The polynucleotides of the disclosure can be synthesized as an IVT polynucleotide, chimeric polynucleotide or a circular polynucleotide and such embodiments are contemplated.

[0055] In some embodiments, the polynucleotide is a DNA or RNA that comprises at least one chemically modified nucleoside. In some embodiments, the at least one chemically modified nucleoside is selected from any of those described herein.

[0056] In some embodiments, the polynucleotide further comprises or encodes a 5′ UTR. In other embodiments, the polynucleotide further comprises or encodes a 3′ UTR. In some embodiments, the UTR comprises or encodes a miRNA (e.g., miR-142-3p, miR-142-5p, miR-126-3p, and/or miR-126-5p). In some embodiments, the polynucleotide further comprises a 5′ terminal cap. In some embodiments, the polynucleotide further comprises or encodes a 3′ polyA tail.

[0057] In some embodiments, the polynucleotide is RNA, e.g., mRNA. In some embodiments, the mRNA comprises the sequences listed in SEQ ID NOs: 766-771.

[0058] In some embodiments, the polynucleotide is an RNA polynucleotide that is formulated in a lipid nanoparticle (LNP) carrier.

[0059] The disclosure is also directed to a method of treating methylmalonic acidemia in a subject, the method comprising administering to the subject an effective amount of a polynucleotide comprising an mRNA encoding an MCM polypeptide, wherein the administration alleviates the symptoms of methylmalonic acidemia in the subject. In some embodiments, the polynucleotide useful for the disclosure is any one of the polynucleotides encoding an MCM polypeptide described herein or is formulated as any one of the compositions described herein.

[0060] In some embodiments, the disclosure includes a method of reducing the level of a metabolite associated with methylmalonic acidemia in a subject in need thereof, the method comprising administering to the subject an effective amount of a polynucleotide comprising an mRNA encoding an MCM polypeptide. In some embodiments, the polynucleotide is a polynucleotide described elsewhere herein, or is formulated as a composition described herein. In certain embodiments, the polynucleotide reduces the level of methylmalonic acid present in the subject after the administration by at least about 10%, at least about 20%, at least about 30%, at least about 40%, at least about 50%, at least about 60%, at least about 70%, at least about 80%, at least about 90%, or about 100%. In other embodiments, after the administration, the polynucleotide reduces the level of propionyl-carnitine present in the subject by at least about 10%, at least about 20%, at least about 30%, at least about 40%, at least about 50%, at least about 60%, at least about 70%, at least about 80%, at least about 90%, or about 100%. In yet other embodiments, the polynucleotide reduces the level of acetyl-carnitine present in the subject after the administration by at least about 10%, at least about 20%, at least about 30%, at least about 40%, at least about 50%, at least about 60%, at least about 70%, at least about 80%, at least about 90%, or about 100%. In certain embodiments, one or more metabolites associated with methylmalonic acidemia are reduced after the administration within one day, within two days, within three days, within four days, within five days, within seven days, within one week, within two weeks, within three weeks, or within one month of the administration of the polynucleotide.

[0061] The details of various embodiments of the disclosure are set forth in the description below. Other features, objects, and advantages of the disclosure will be apparent from the description and the drawings, and from the claims.

### EMBODIMENTS

[0062] E1. A composition comprising a polynucleotide that comprises an open reading frame (ORF) encoding an MCM polypeptide and a delivery agent, wherein the delivery agent comprises a compound having the formula (I)

[chemical structure]

[0063] or a salt or stereoisomer thereof, wherein

[0064] R₁ is selected from the group consisting of C₅₋₂₀ alkyl, C₅₋₂₀ alkenyl, —R*YR″, —YR″, and —R″M′R′

[0065] R₂ and R₃ are independently selected from the group consisting of H, C₁₋₁₄ alkyl, C₂₋₁₄ alkenyl, —R*YR″, —YR″, and —R*OR″, or R₂ and R₃, together with the atom to which they are attached, form a heterocycle or carbocycle;

[0066] R₄ is selected from the group consisting of a C₃₋₆ carbocycle, —(CH₂)ₙQ, —(CH₂)ₙCHQR,

[0067] —CHQR, —CQ(R)₂, and unsubstituted C₁₋₆ alkyl, where Q is selected from a carbocycle, heterocycle,

[0068] —OR, —O(CH₂)ₙN(R)₂, —C(O)OR, —OC(O)R, —CX₃, —CX₂H, —CXH₂, —CN, —N(R)₂, —C(O)N(R)₂, —N(R)C(O)R, —N(R)S(O)₂R, —N(R)C(O)N(R)₂, —N(R)C(S)N(R)₂, and —C(R)N(R)₂C(O)OR, and each n is independently selected from 1, 2, 3, 4, and 5;

[0069] each R₅ is independently selected from the group consisting of C₁₋₃ alkyl, C₂₋₃ alkenyl, and H;

[0070] each R₆ is independently selected from the group consisting of C₁₋₃ alkyl, C₂₋₃ alkenyl, and H;

[0071] M and M′ are independently selected from —C(O)O—, —OC(O)—, —C(O)N(R′)—,

[0072] —N(R′)C(O)—, —C(O)—, —C(S)—, —C(S)S—, —SC(S)—, —CH(OH)—, —P(O)(OR′)O—, —S(O)₂—, an aryl group, and a heteroaryl group;

[0073] R₇ is selected from the group consisting of C₁₋₃ alkyl, C₂₋₃ alkenyl, and H;

[0074] each R is independently selected from the group consisting of C₁₋₃ alkyl, C₂₋₃ alkenyl, and H;

[0075] each R′ is independently selected from the group consisting of C₁₋₁₈ alkyl, C₂₋₁₈ alkenyl, —R*YR″, —YR″, and H;

[0076] each R″ is independently selected from the group consisting of C₃₋₁₄ alkyl and C₃₋₁₄ alkenyl;

[0077] each R* is independently selected from the group consisting of C₁₋₁₂ alkyl and C₂₋₁₂ alkenyl;

[0078] each Y is independently a C₃₋₆ carbocycle;

[0079] each X is independently selected from the group consisting of F, Cl, Br, and I; and

[0080] m is selected from 5, 6, 7, 8, 9, 10, 11, 12, and 13; and

provided when R₄ is —(CH₂)ₙQ, —(CH₂)ₙCHQR, —CHQR, or —CQ(R)₂, then (i) Q is not —N(R)₂ when n is 1, 2, 3, 4 or 5, or (ii) Q is not 5, 6, or 7-membered heterocycloalkyl when n is 1 or 2.

[0081] E2. The composition of embodiment 1, wherein the ORF has at least 80%, at least 85%, at least 86%, at least 87%, at least 88%, at least 89%, at least 90%, at least 91%, at least 92%, at least 93%, at least 94%, at least 95%, at least 96%, at least 97%, at least 98%, at least 99%, or 100% sequence identity to a sequence selected from the group consisting of nucleotides 97 to nucleotides 2250 of SEQ ID NOs: 1 to 207, 732 to 765, and 772.

[0082] E3. The composition of embodiment 1 or 2, wherein the ORF has

[0083] (i) at least 99% or 100% sequence identity to nucleotide 97 to nucleotide 2250 of SEQ ID NO: 734,

[0084] (ii) at least 98%, at least 99%, or 100% sequence identity to nucleotide 97 to nucleotide 2250 of SEQ ID NO: 732,

[0085] (iii) at least 92%, at least 93%, at least 94%, at least 95%, at least 96%, at least 97%, at least 98%, at least 99%, or 100% sequence identity to a sequence selected from the group consisting of nucleotides 97 to nucleotides 2250 of SEQ ID NOs: 182, 733, and 741;

[0086] (iv) at least 91%, at least 92%, at least 93%, at least 94%, at least 95%, at least 96%, at least 97%, at least 98%, at least 99%, or 100% sequence identity to a sequence selected from the group consisting of nucleotides 97 to nucleotides 2250 of SEQ ID NOs: 735, 736, 738, 743, 744, 748, 749, 750, 754, 755, 758, 762, and 765;

[0087] (v) at least 90%, at least 91%, at least 92%, at least 93%, at least 94%, at least 95%, at least 96%, at least 97%, at least 98%, at least 99%, or 100% sequence identity to a sequence selected from the group consisting of nucleotides 97 to nucleotides 2250 of SEQ ID NOs: 180, 187, 737, 739, 740, 742, 745, 746, 747, 751, 752, 753, 757, 759, 760, 761, 763, and 764;

[0088] (vi) at least 89%, at least 90%, at least 91%, at least 92%, at least 93%, at least 94%, at least 95%, at least 96%, at least 97%, at least 98%, at least 99%, or 100% sequence identity to a sequence selected from the group consisting of nucleotides 97 to nucleotides 2250 of SEQ ID NOs: 181 and 756;

[0089] (vii) at least 88%, at least 89%, at least 90%, at least 91%, at least 92%, at least 93%, at least 94%, at least 95%, at least 96%, at least 97%, at least 98%, at least 99%, or 100% sequence identity to a sequence selected from the group consisting of nucleotides 97 to nucleotides 2250 of SEQ ID NO: 154, 165, 171, 173, and 175;

[0090] (viii) at least 87%, at least 88%, at least 89%, at least 90%, at least 91%, at least 92%, at least 93%, at least 94%, at least 95%, at least 96%, at least 97%, at least 98%, at least 99%, or 100% sequence identity to a sequence selected from the group consisting of nucleotides 97 to nucleotides 2250 of SEQ ID NO: 151, 152, 153, 163, 164, 166, 167, 168, 169, 170, 172, 177, 178, 179, 195, and 204;

[0091] (ix) at least 86%, at least 87%, at least 88%, at least 89%, at least 90%, at least 91%, at least 92%, at least 93%, at least 94%, at least 95%, at least 96%, at least 97%, at least 98%, at least 99%, or 100% sequence identity to a sequence selected from the group consisting of nucleotides 97 to nucleotides 2250 of SEQ ID NOs: 156, 157, 158, 159, 160, 161, 162, 174 and 176;

[0092] (x) at least 85%, at least 86%, at least 87%, at least 88%, at least 89%, at least 90%, at least 91%, at least 92%, at least 93%, at least 94%, at least 95%, at least 96%, at least 97%, at least 98%, at least 99%, or 100% sequence identity to a sequence selected from the group consisting of nucleotides 97 to nucleotides 2250 of SEQ ID NOs: 155 and 203;

[0093] (xi) at least 82%, at least 83%, at least 84%, at least 85%, at least 86%, at least 87%, at least 88%, at least 89%, at least 90%, at least 91%, at least 92%, at least 93%, at least 94%, at least 95%, at least 96%, at least 97%, at least 98%, at least 99%, or 100% sequence identity to a sequence selected from the group consisting of nucleotides 97 to nucleotides 2250 of SEQ ID NOs: 64, 66, 71, 91, and 128;

[0094] (xii) at least 81%, at least 82%, at least 83%, at least 84%, at least 85%, at least 86%, at least 87%, at least 88%, at least 89%, at least 90%, at least 91%, at least 92%, at least 93%, at least 94%, at least 95%, at least 96%, at least 97%, at least 98%, at least 99%, or 100% sequence identity to a sequence selected from the group consisting of nucleotides 97 to nucleotides 2250 of SEQ ID NOs: 9, 11, 18, 19, 21, 22, 23, 24, 32, 33, 37, 39, 40, 44, 45, 47, 50, 51, 52, 55, 57, 61, 65, 70, 79, 84, 86, 88, 90, 92, 98, 100, 115, 117, 126, 129, 135, 136, 137, 144, 148, 150, 184, 190, 191, and 206;

[0095] (xiii) at least 80%, at least 81%, at least 82%, at least 83%, at least 84%, at least 85%, at least 86%, at least 87%, at least 88%, at least 89%, at least 90%, at least 91%, at least 92%, at least 93%, at least 94%, at least 95%, at least 96%, at least 97%, at least 98%, at least 99%, or 100% sequence identity to a sequence selected from the group consisting of nucleotides 97 to nucleotides 2250 of SEQ ID NOs: 3, 5, 6, 8, 10, 12, 14, 16, 17, 20, 27, 28, 29, 31, 34, 35, 36, 38, 41, 42, 43, 46, 48, 49, 53, 54, 56, 58, 60, 63, 68, 69, 74, 77, 78, 80, 83, 85, 87, 93, 95, 96, 97, 99, 102, 103, 104, 105, 107, 110, 112, 113, 114, 116, 119, 120, 122, 123, 124, 125, 127, 131, 132, 133, 134, 138, 139, 140, 141, 142, 143, 147, 149, 183, 186, 188, 189, 192, 193, 194, 196, 197, 198, 199, 200, 201, 202, 205, and 207; or

[0096] (xiv) at least 79%, at least 80%, at least 81%, at least 82%, at least 83%, at least 84%, at least 85%, at least 86%, at least 87%, at least 88%, at least 89%, at least 90%, at least 91%, at least 92%, at least 93%, at least 94%, at least 95%, at least 96%, at least 97%, at least 98%, at least 99%, or 100% sequence identity to a sequence selected from the group consisting of nucleotides 97 to nucleotides 2250 of SEQ ID NOs: 1, 2, 4, 7, 13, 15, 25, 26, 30, 59, 62, 67, 72, 73, 75, 76, 81, 82, 89, 94, 101, 106, 108, 109, 111, 118, 121, 130, 145, 146, and 185.

[0097] E4. The composition of any one of embodiments 1 to 3, wherein the ORF further comprises a nucleic acid sequence encoding a transit peptide.

[0098] E5. The composition of embodiment 4, wherein the transit peptide comprises a mitochondrial transit peptide.

[0099] E6. The composition of embodiment 5, wherein the mitochondrial transit peptide is derived from a protein selected from the group consisting of SEQ ID NOs: 251 to 265 and 270 to 719.

[0100] E7. The composition of any one of embodiments 4 to 6, wherein the nucleic acid sequence encoding a transit peptide has at least about 70%, at least about 80%, at least about 90%, at least about 95%, at least about 96%, at least about 97%, at least about 98%, at least about 99%, or about 100% sequence identity to a sequence selected from the group consisting of nucleotides 1 to 96 of SEQ ID NOs: 1 to 207, 732 to 765, and 772.

[0101] E8. The composition of any one of embodiments 1 to 7, wherein the ORF has

[0102] (i) at least 99% or 100% sequence identity to nucleotide 1 to nucleotide 2250 of SEQ ID NO: 734;

[0103] (ii) at least 98%, at least 99%, or 100% sequence identity to nucleotide 1 to nucleotide 2250 of SEQ ID NO: 732;

[0104] (iii) at least 92%, at least 93%, at least 94%, at least 95%, at least 96%, at least 97%, at least 98%, at least 99%, or 100% sequence identity to a sequence selected from the group consisting of nucleotides 1 to nucleotides 2250 of SEQ ID NOs: 182 and 733;

[0105] (iv) at least 91%, at least 92%, at least 93%, at least 94%, at least 95%, at least 96%, at least 97%, at least 98%, at least 99%, or 100% sequence identity to a sequence selected from the group consisting of nucleotides 1 to nucleotides 2250 of SEQ ID NOs: 735, 741, 743, 744, 748, 758, 762, and 765;

[0106] (v) at least 90%, at least 91%, at least 92%, at least 93%, at least 94%, at least 95%, at least 96%, at least 97%, at least 98%, at least 99%, or 100% sequence identity to a sequence selected from the group consisting of nucleotides 1 to nucleotides 2250 of SEQ ID NOs: 180, 181, 736, 738, 739, 740, 742, 746, 747, 749, 750, 751, 752, 753, 754, 755, 757, 759, 760, 761, and 763;

[0107] (vi) at least 89%, at least 90%, at least 91%, at least 92%, at least 93%, at least 94%, at least 95%, at least 96%, at least 97%, at least 98%, at least 99%, or 100% sequence identity to a sequence selected from the group consisting of nucleotides 1 to nucleotides 2250 of SEQ ID NO: 745, 756, and 764;

[0108] (vii) at least 88%, at least 89%, at least 90%, at least 91%, at least 92%, at least 93%, at least 94%, at least 95%, at least 96%, at least 97%, at least 98%, at least 99%, or 100% sequence identity to a sequence selected from the group consisting of nucleotides 1 to nucleotides 2250 of SEQ ID NO: 154, 165, 171, 173, and 175;

[0109] (viii) at least 87%, at least 88%, at least 89%, at least 90%, at least 91%, at least 92%, at least 93%, at least 94%, at least 95%, at least 96%, at least 97%, at least 98%, at least 99%, or 100% sequence identity to a sequence selected from the group consisting of nucleotides 1 to nucleotides 2250 of SEQ ID NO: 151, 152, 153, 163, 166, 167, 168, 169, 170, 172, 177, 178, 179, 187, and 204;

[0110] (ix) at least 86%, at least 87%, at least 88%, at least 89%, at least 90%, at least 91%, at least 92%, at least 93%, at least 94%, at least 95%, at least 96%, at least 97%, at least 98%, at least 99%, or 100% sequence identity to a sequence selected from the group consisting of nucleotides 1 to nucleotides 2250 of SEQ ID NO: 156, 157, 158, 159, 160, 162, 164, 174, 176, 195, and 737;

[0111] (x) at least 85%, at least 86%, at least 87%, at least 88%, at least 89%, at least 90%, at least 91%, at least 92%, at least 93%, at least 94%, at least 95%, at least 96%, at least 97%, at least 98%, at least 99%, or 100% sequence identity to a sequence selected from the group consisting of nucleotides 1 to nucleotides 2250 of SEQ ID NOs: 155, 161, and 203;

[0112] (xi) at least 82%, at least 83%, at least 84%, at least 85%, at least 86%, at least 87%, at least 88%, at least 89%, at least 90%, at least 91%, at least 92%, at least 93%, at least 94%, at least 95%, at least 96%, at least 97%, at least 98%, at least 99%, or 100% sequence identity to a sequence selected from the group consisting of nucleotides 1 to nucleotides 2250 of SEQ ID NOs: 71 and 128;

[0113] (xii) at least 81%, at least 82%, at least 83%, at least 84%, at least 85%, at least 86%, at least 87%, at least 88%, at least 89%, at least 90%, at least 91%, at least 92%, at least 93%, at least 94%, at least 95%, at least 96%, at least 97%, at least 98%, at least 99%, or 100% sequence identity to a sequence selected from the group consisting of nucleotides 1 to nucleotides 2250 of SEQ ID NOs: 4, 6, 8, 9, 11, 19, 22, 23, 24, 32, 33, 37, 40, 44, 45, 47, 51, 61, 64, 65, 66, 79, 84, 86, 90, 91, 92, 100, 101, 112, 115, 117, 126, 129, 135, 136, 146, 148, 184, 190, and 191;

[0114] (xiii) at least 80%, at least 81%, at least 82%, at least 83%, at least 84%, at least 85%, at least 86%, at least 87%, at least 88%, at least 89%, at least 90%, at least 91%, at least 92%, at least 93%, at least 94%, at least 95%, at least 96%, at least 97%, at least 98%, at least 99%, or 100% sequence identity to a sequence selected from the group consisting of nucleotides 1 to nucleotides 2250 of SEQ ID NOs: 2, 3, 5, 7, 10, 12, 13, 14, 15, 16, 18, 20, 21, 26, 27, 28, 29, 31, 34, 36, 38, 39, 41, 42, 43, 46, 48, 49, 52, 53, 54, 55, 56, 57, 58, 59, 60, 62, 68, 69, 70, 72, 73, 74, 76, 77, 80, 83, 85, 88, 95, 96, 97, 98, 102, 104, 105, 106, 107, 108, 109, 110, 113, 114, 120, 121, 122, 123, 124, 127, 131, 132, 133, 134, 137, 138, 139, 140, 141, 142, 144, 145, 147, 149, 150, 186, 188, 189, 192, 193, 194, 196, 198, 199, 200, 202, 205, 206, and 207; or

[0115] (xiv) at least 79%, at least 80%, at least 81%, at least 82%, at least 83%, at least 84%, at least 85%, at least 86%, at least 87%, at least 88%, at least 89%, at least 90%, at least 91%, at least 92%, at least 93%, at least 94%, at least 95%, at least 96%, at least 97%, at least 98%, at least 99%, or 100% sequence identity to a sequence selected from the group consisting of nucleotides 1 to nucleotides 2250 of SEQ ID NOs: 1, 17, 25, 30, 35, 50, 63, 67, 75, 78, 81, 82, 87, 89, 93, 94, 99, 103, 111, 116, 118, 119, 125, 130, 143, 183, 185, 197, and 201.

[0116] E9. The composition of any one of embodiments 1 to 8, wherein the MCM polypeptide comprises an amino acid sequence at least about 95%, at least about 96%, at least about 97%, at least about 98%, at least about 99%, or about 100% identical to SEQ ID NO: 208, and wherein the MCM polypeptide retains methylmalonyl-CoA mutase activity.

[0117] E10. The composition of embodiment 9, wherein the MCM polypeptide comprises SEQ ID NO: 209.

[0118] E11. The composition of embodiment 9, wherein the MCM polypeptide comprises SEQ ID NO: 210.

[0119] E12. The composition of embodiment 9, wherein the MCM polypeptide comprises SEQ ID NO: 211.

[0120] E13. The composition of embodiment 9, wherein the MCM polypeptide comprises SEQ ID NO: 212.

[0121] E14. The composition of embodiment 9, wherein the MCM polypeptide comprises SEQ ID NO: 213.

[0122] E15. The composition of any one of embodiments 1-14, wherein the polynucleotide comprises at least one chemically modified nucleobase, sugar, backbone, or any combination thereof.

[0123] E16. The composition of embodiment 15, wherein the at least one chemically modified nucleobase is selected from the group consisting of pseudouracil (ψ), N1-methylpseudouracil (m1ψ), 2-thiouracil (s2U), 4′-thiouracil, 5-methylcytosine, 5-methyluracil, and any combination thereof.

[0124] E17. The composition of embodiment 16, wherein the at least one chemically modified nucleoside is 5-methoxyuracil.

[0125] E18. The composition of any one of embodiments 1-17, wherein the nucleosides in the polynucleotide sequence are chemically modified by at least 10%, at least 20%, at least 30%, at least 40%, at least 50%, at least 60%, at least 70%, at least 80%, at least 90%, at least 95%, at least 99%, or 100%.

[0126] E19. The composition of any one of embodiments 15-18, wherein the chemically modified nucleosides in the polynucleotide sequence are selected from the group consisting of uridine, adenine, cytosine, guanine, and any combination thereof.

[0127] E20. The composition of any one of embodiments 1-19, wherein the uridine nucleosides in the polynucleotide sequence are chemically modified by at least 10%, at least 20%, at least 30%, at least 40%, at least 50%, at least 60%, at least 70%, at least 80%, at least 90%, at least 95%, at least 99%, or 100%.

[0128] E21. The composition of any one of embodiments 1-20, wherein the adenine nucleosides in the polynucleotide sequence are chemically modified by at least 10%, at least 20%, at least 30%, at least 40%, at least 50%, at least 60%, at least 70%, at least 80%, at least 90%, at least 95%, at least 99%, or 100%.

[0129] E22. The composition of any one of embodiments 1-21, wherein the cytosine nucleosides in the polynucleotide sequence are chemically modified by at least at least 10%, at least 20%, at least 30%, at least 40%, at least 50%, at least 60%, at least 70%, at least 80%, at least 90%, at least 95%, at least 99%, or 100%.

[0130] E23. The composition of any one of embodiments 1-22, wherein the guanine nucleosides in the polynucleotide sequence are chemically modified by at least at least 10%, at least 20%, at least 30%, at least 40%, at least 50%, at least 60%, at least 70%, at least 80%, at least 90%, at least 95%, at least 99%, or 100%.

[0131] E24. The composition of any one of embodiments 1-23, wherein the polynucleotide further comprises a 5′ UTR.

[0132] E25. The composition of embodiment 24, wherein the 5′ UTR comprises a nucleic acid sequence at least 90%, 95%, 96%, 97%, 98%, 99%, or 100% identical to a sequence selected from SEQ ID NOs: 215-231, 266, and 725-731.

[0133] E26. The composition of any one of embodiments 1 to 25, wherein the polynucleotide further comprises a miRNA binding site.

[0134] E27. The composition of embodiment 26, wherein the miRNA binding site comprises one or more polynucleotide sequences selected SEQ ID NOs: 720, 721, 722, 723, and 724.

[0135] E28. The composition of embodiment 26, wherein the miRNA binding site binds to miR-142 or miR-126.

[0136] E29. The composition of embodiment 26, wherein the miRNA binding site binds to miR-142-3p, miR-142-5p, miR-126-3p, or miR-126-5p.

[0137] E30. The composition of embodiment 24, wherein the 5′UTR comprises a sequence selected from SEQ ID NOs: 725, 726, 727, 728, 729, 730, and 731.

[0138] E31. The composition of any one of embodiments 24-30, wherein the 5′ UTR is sequence optimized.

[0139] E32. The composition of any one of embodiments 1-31, wherein the polynucleotide further comprises a 3′ UTR.

[0140] E33. The composition of embodiment 32, wherein the 3′ UTR comprises a nucleic acid sequence at least 90%, 95%, 96%, 97%, 98%, 99%, or 100% identical to a sequence selected from SEQ ID NO: 232-248 and 267.

[0141] E34. The composition of embodiment 32 or 33, wherein the 3′ UTR is codon optimized.

[0142] E35. The composition of any one of embodiments 1-34, wherein the polynucleotide further comprises a 5′ terminal cap.

[0143] E36. The composition of embodiment 35, wherein the 5′ terminal cap is a Cap0, Cap1, ARCA, inosine, N1-methyl-guanosine, 2′fluoro-guanosine, 7-deaza-guanosine, 8-oxo-guanosine, 2-amino-guanosine, LNA-guanosine, 2-azidoguanosine, Cap2, Cap4, 5′ methylG cap, or an analog thereof.

[0144] E37. The composition of any one of embodiments 1-36, wherein the polynucleotide further comprises a 3′ polyA tail.

[0145] E38. The composition of any one of embodiments 1-37, wherein the polynucleotide is RNA.

[0146] E39. The composition of embodiment 38, wherein the RNA is mRNA.

[0147] E40. The composition of any one of embodiments 1-39, wherein the polynucleotide is in vitro transcribed (IVT).

[0148] E41. The composition of any one of embodiments 1-40, wherein the polynucleotide is chimeric.

[0149] E42. The composition of any one of embodiments 1-41, wherein the polynucleotide is circular.

[0150] E43. The composition of any one of embodiments 1-42, wherein the polynucleotide is purified by strong anion exchange HPLC, weak anion exchange HPLC, reverse phase HPLC (RP-HPLC), and hydrophobic interaction HPLC (HIC-HPLC), liquid chromatography-mass spectrometry (LCMS), capillary electrophoresis (CE) and capillary gel electrophoresis (CGE).

[0151] E44. The composition of any one of embodiments 1-43, wherein the compound is of Formula (IA):

[chemical structure]

[0152] or a salt or stereoisomer thereof, wherein

[0153] l is selected from 1, 2, 3, 4, and 5;

[0154] m is selected from 5, 6, 7, 8, and 9;

[0155] M₁ is a bond or M′;

[0156] R₄ is unsubstituted C₁₋₃ alkyl, or —(CH₂)ₙQ, in which n is 1, 2, 3, 4, or 5 and Q is OH, —NHC(S)N(R)₂, or —NHC(O)N(R)₂;

[0157] M and M′ are independently selected from C(O)O, OC(O), C(O)N(R′), P(O)(OR′)O, an aryl group, and a heteroaryl group; and

[0158] R₂ and R₃ are independently selected from the group consisting of H, C₁₋₁₄ alkyl, and C₂₋₁₄ alkenyl.

[0159] E45. The composition of any one of embodiments 1 to 44, wherein m is 5, 7, or 9.

[0160] E46. The composition of any one of embodiments 1 to 45, wherein the compound is of Formula (II):

[chemical structure]

[0161] or a salt or stereoisomer thereof, wherein

[0162] l is selected from 1, 2, 3, 4, and 5;

[0163] M₁ is a bond or M′;

[0164] R₄ is unsubstituted C₁₋₃ alkyl, or —(CH₂)ₙQ, in which n is 2, 3, or 4 and Q is OH, —NHC(S)N(R)₂, or —NHC(O)N(R)₂;

[0165] M and M′ are independently selected from —C(O)O, OC(O), C(O)N(R′), P(O)(OR′)O, an aryl group, and a heteroaryl group; and

[0166] R₂ and R₃ are independently selected from the group consisting of H, C₁₋₁₄ alkyl, and C₂₋₁₄ alkenyl.

[0167] E47. The composition of any one of embodiments 44 to 46, wherein M₁ is M′.

[0168] E48. The composition of embodiment 47, wherein M and M′ are independently —C(O)O— or —OC(O)—.

[0169] E49. The composition of any one of embodiments 44 to 48, wherein 1 is 1, 3, or 5.

[0170] E50. The composition of any one of embodiments 1 to 43, wherein the compound is selected from the group consisting of Compound 1 to Compound 147, salts and stereoisomers thereof, and any combination thereof.

[0171] E51. The composition of any one of embodiments 1 to 43, wherein the compound is of the Formula (IIa),

[chemical structure]

or a salt or stereoisomer thereof.

[0172] E52. The composition of any one of embodiments 1 to 43, wherein the compound is of the Formula (IIb),

[chemical structure]

or a salt or stereoisomer thereof.

[0173] E53. The composition of any one of embodiments 1 to 43, wherein the compound is of the Formula (IIc) or (IIe),

[chemical structure]

[0174] or a salt or stereoisomer thereof.

[0175] E54. The composition of any one of embodiments 51 to 53, wherein R₄ is selected from —(CH₂)ₙQ and —(CH₂)ₙCHQR.

[0176] E55. The composition of any one of embodiments 1 to 43, wherein the compound is of the Formula (IId),

[chemical structure]

or a salt or stereoisomer thereof,

[0177] wherein R₂ and R₃ are independently selected from the group consisting of C₅₋₁₄ alkyl and C₅₋₁₄ alkenyl, n is selected from 2, 3, and 4, and R′, R″, R₅, R₆ and m are as defined in embodiment 1.

[0178] E56. The composition of embodiment 55, wherein R₂ is C₈ alkyl.

[0179] E57. The composition of embodiment 56, wherein R₃ is C₅ alkyl, C₆ alkyl, C₇ alkyl, C₈ alkyl, or C₉ alkyl.

[0180] E58. The composition of any one of embodiments 55 to 57, wherein m is 5, 7, or 9.

[0181] E59. The composition of any one of embodiments 55 to 58, wherein each R₅ is H.

[0182] E60. The composition of embodiment 59, wherein each R₆ is H.

[0183] E61. The composition of any one of embodiments 1 to 60, wherein the composition is a nanoparticle composition.

[0184] E62. The composition of embodiment 61, wherein the delivery agent further comprises a phospholipid.

[0185] E63. The composition of embodiment 62, wherein the phospholipid is selected from the group consisting of 1,2-dilinoleoyl-sn-glycero-3-phosphocholine (DLPC), 1,2-dimyristoyl-sn-glycero-phosphocholine (DMPC), 1,2-dioleoyl-sn-glycero-3-phosphocholine (DOPC), 1,2-dipalmitoyl-sn-glycero-3-phosphocholine (DPPC), 1,2-distearoyl-sn-glycero-3-phosphocholine (DSPC), 1,2-diundecanoyl-sn-glycero-phosphocholine (DUPC), 1-palmitoyl-2-oleoyl-sn-glycero-3-phosphocholine (POPC), 1,2-di-O-octadecenyl-sn-glycero-3-phosphocholine (18:0 Diether PC), 1-oleoyl-2-cholesterylhemisuccinoyl-sn-glycero-3-phosphocholine (OChemsPC), 1-hexadecyl-sn-glycero-3-phosphocholine (C16 Lyso PC), 1,2-dilinolenoyl-sn-glycero-3-phosphocholine, 1,2-diarachidonoyl-sn-glycero-3-phosphocholine, 1,2-didocosahexaenoyl-sn-glycero-3-phosphocholine, 1,2-dioleoyl-sn-glycero-3-phosphoethanolamine (DOPE), 1,2-diphytanoyl-sn-glycero-3-phosphoethanolamine (ME 16:0 PE), 1,2-di stearoyl-sn-glycero-3-phosphoethanolamine, 1,2-dilinoleoyl-sn-glycero-3-phosphoethanolamine, 1,2-dilinolenoyl-sn-glycero-3-phosphoethanolamine, 1,2-diarachidonoyl-sn-glycero-3-phosphoethanolamine, 1,2-didocosahexaenoyl-sn-glycero-3-phosphoethanolamine, 1,2-dioleoyl-sn-glycero-3-phospho-rac-(1-glycerol) sodium salt (DOPG), sphingomyelin, and any mixtures thereof.

[0186] E64. The composition of any one of embodiments 1 to 63, wherein the delivery agent further comprises a structural lipid.

[0187] E65. The composition of embodiment 64, wherein the structural lipid is selected from the group consisting of cholesterol, fecosterol, sitosterol, ergosterol, campesterol, stigmasterol, brassicasterol, tomatidine, ursolic acid, alpha-tocopherol, and any mixtures thereof.

[0188] E66. The composition of any one of embodiments 1 to 65, wherein the delivery agent further comprises a PEG lipid.

[0189] E67. The composition of embodiment 66, wherein the PEG lipid is selected from the group consisting of a PEG-modified phosphatidylethanolamine, a PEG-modified phosphatidic acid, a PEG-modified ceramide, a PEG-modified dialkylamine, a PEG-modified diacylglycerol, a PEG-modified dialkylglycerol, and any mixtures thereof.

[0190] E68. The composition of any one of embodiments 1 to 67, wherein the delivery agent further comprises an ionizable lipid selected from the group consisting of 3-(didodecylamino)-N1,N1,4-tridodecyl-1-piperazineethanamine (KL10), N1-[2-(didodecylamino)ethyl]-N1,N4,N4-tridodecyl-1,4-piperazinediethanamine (KL22), 14,25-ditridecyl-15,18,21,24-tetraaza-octatriacontane (KL25), 1,2-dilinoleyloxy-N,N-dimethylaminopropane (DLin-DMA), 2,2-dilinoleyl-4-dimethylaminomethyl-[1,3]-dioxolane (DLin-K-DMA), heptatriaconta-6,9,28,31-tetraen-19-yl 4-(dimethylamino)butanoate (DLin-MC3-DMA), 2,2-dilinoleyl-4-(2-dimethylaminoethyl)-[1,3]-dioxolane (DLin-KC2-DMA), 1,2-dioleyloxy-N,N-dimethylaminopropane (DODMA), 2-({8-[(3β)-cholest-5-en-3-yloxy]octyl}oxy)-N,N-dimethyl-3-[(9Z,12Z)-octadeca-9,12-dien-1-yl oxy]propan-1-amine (Octyl-CLinDMA), (2R)-2-({8-[(3β)-cholest-5-en-3-yloxy]octyl}xy)-N,N-dimethyl-3-[(9Z,12Z)-octadeca-9,12-dien-1-yloxy]propan-1-amine (Octyl-CLinDMA (2R)), and (2S)-2-({8-[(3β)-cholest-5-en-3-yloxy]octyl}oxy)-N,N-dimethyl-3-[(9Z,12Z)-octadeca-9,12-dien-1-yloxy]propan-1-amine (Octyl-CLinDMA (2S)).

[0191] E69. The composition of any one of embodiments 1 to 68, wherein the delivery agent further comprises a phospholipid, a structural lipid, a PEG lipid, or any combination thereof.

[0192] E70. The composition of any one of embodiments 1-69, wherein the composition is formulated for in vivo delivery.

[0193] E71. The composition of embodiment 70 which is formulated for intramuscular, subcutaneous, or intradermal delivery.

[0194] E72. The composition of any one of embodiments 1-71 which increases cellular expression of MCM.

[0195] E73. The composition of embodiment 72, wherein the cellular expression of MCM is increased by at least 20%, at least 25%, at least 30%, at least 35%, at least 40%, at least 45%, or at least 50%.

[0196] E74. A method of administering the composition of any one of embodiments 1-73, wherein the administration alleviates the symptoms of methylmalonic acidemia in the subject.

[0197] E75. The method of embodiment 74, wherein the administration results in a reduction of the level of a metabolite associated with methylmalonic acidemia in a subject in need thereof.

[0198] E76. The method of embodiment 74 or 75, further comprising measuring the level of the metabolite in the subject or in a sample obtained from the subject before and/or after the administering.

[0199] E77. The method of embodiment 76, wherein the sample is taken from the subject's blood, urine, cerebrospinal fluid, or any combination thereof.

[0200] E78. The method of any of embodiments 74 to 77, wherein the administration reduces the level of methylmalonic acid present in the subject by at least about 10%, at least about 20%, at least about 30%, at least about 40%, at least about 50%, at least about 60%, at least about 70%, at least about 80%, at least about 90%, or about 100%.

[0201] E79. The method of any of embodiments 74 to 78, wherein the polynucleotide reduces the level of propionyl-carnitine present in the subject by at least about 10%, at least about 20%, at least about 30%, at least about 40%, at least about 50%, at least about 60%, at least about 70%, at least about 80%, at least about 90%, or about 100%.

[0202] E80. The method of any of embodiments 74 to 79, wherein the polynucleotide reduces the level of acetyl-carnitine present in the subject by at least about 10%, at least about 20%, at least about 30%, at least about 40%, at least about 50%, at least about 60%, at least about 70%, at least about 80%, at least about 90%, or about 100%.

[0203] E81. The method of any one of embodiments 74 to 80, wherein one or more metabolites associated with methylmalonic acidemia are reduced within one day, within two days, within three days, within four days, within five days, within seven days, within one week, within two weeks, within three weeks, or within one month of the administration of the polynucleotide.

[0204] E82. A method of treating methylmalonic acidemia in a subject in need thereof, the method comprising administering to the subject an effective amount of a polynucleotide comprising an mRNA that comprises an ORF encoding an MCM polypeptide, wherein the administration alleviates the symptoms of methylmalonic acidemia in the subject.

[0205] E83. The method of embodiment 82, wherein the polynucleotide comprises the polynucleotide in the composition of any one of embodiments 1 to 73.

[0206] E84. The method of embodiment 82 or 83, wherein the administration reduces the level of a metabolite associated with methylmalonic acidemia in a subject in need thereof.

[0207] E85. The method of any one of embodiments 82-84, further comprising measuring the level of the metabolite in the subject or in a sample obtained from the subject before and/or after the administering.

[0208] E86. The method of embodiment 85, wherein the sample is taken from the subject's blood, urine, cerebrospinal fluid, or any combination thereof.

[0209] E87. The method of any of embodiments 82 to 86, wherein the polynucleotide reduces the level of methylmalonic acid present in the subject by at least about 10%, at least about 20%, at least about 30%, at least about 40%, at least about 50%, at least about 60%, at least about 70%, at least about 80%, at least about 90%, or about 100%.

[0210] E88. The method of any of embodiments 82 to 87, wherein the polynucleotide reduces the level of propionyl-carnitine present in the subject by at least about 10%, at least about 20%, at least about 30%, at least about 40%, at least about 50%, at least about 60%, at least about 70%, at least about 80%, at least about 90%, or about 100%.

[0211] E89. The method of any of embodiments 82 to 88, wherein the polynucleotide reduces the level of acetyl-carnitine present in the subject by at least about 10%, at least about 20%, at least about 30%, at least about 40%, at least about 50%, at least about 60%, at least about 70%, at least about 80%, at least about 90%, or about 100%.

[0212] E90. The method of any one of embodiments 82 to 89, wherein one or more metabolites associated with methylmalonic acidemia are reduced within one day, within two days, within three days, within four days, within five days, within seven days, within one week, within two weeks, within three weeks, or within one month of the administration of the polynucleotide.

[0213] E91. The method of any one of embodiments 82 to 90, wherein the nucleotide is administered as a nanoparticle composition.

[0214] E92. The method of embodiment 91, wherein the composition further comprises a delivery agent.

[0215] E93. The method of embodiment 92, wherein the delivery agent comprises a phospholipid.

[0216] E94. The method of embodiment 93, wherein the phospholipid is selected from the group consisting of 1,2-dilinoleoyl-sn-glycero-3-phosphocholine (DLPC), 1,2-dimyristoyl-sn-glycero-phosphocholine (DMPC), 1,2-dioleoyl-sn-glycero-3-phosphocholine (DOPC), 1,2-dipalmitoyl-sn-glycero-3-phosphocholine (DPPC), 1,2-distearoyl-sn-glycero-3-phosphocholine (DSPC), 1,2-diundecanoyl-sn-glycero-phosphocholine (DUPC), 1-palmitoyl-2-oleoyl-sn-glycero-3-phosphocholine (POPC), 1,2-di-O-octadecenyl-sn-glycero-3-phosphocholine (18:0 Diether PC), 1-oleoyl-2-cholesterylhemisuccinoyl-sn-glycero-3-phosphocholine (OChemsPC), 1-hexadecyl-sn-glycero-3-phosphocholine (C16 Lyso PC), 1,2-dilinolenoyl-sn-glycero-3-phosphocholine, 1,2-diarachidonoyl-sn-glycero-3-phosphocholine, 1,2-didocosahexaenoyl-sn-glycero-3-phosphocholine, 1,2-dioleoyl-sn-glycero-3-phosphoethanolamine (DOPE), 1,2-diphytanoyl-sn-glycero-3-phosphoethanolamine (ME 16:0 PE), 1,2-di stearoyl-sn-glycero-3-phosphoethanolamine, 1,2-dilinoleoyl-sn-glycero-3-phosphoethanolamine, 1,2-dilinolenoyl-sn-glycero-3-phosphoethanolamine, 1,2-diarachidonoyl-sn-glycero-3-phosphoethanolamine, 1,2-didocosahexaenoyl-sn-glycero-3-phosphoethanolamine, 1,2-dioleoyl-sn-glycero-3-phospho-rac-(1-glycerol) sodium salt (DOPG), sphingomyelin, and any mixtures thereof.

[0217] E95. The method of any one of embodiments 92 to 94, wherein the delivery agent further comprises a structural lipid.

[0218] E96. The method of embodiment 95, wherein the structural lipid is selected from the group consisting of cholesterol, fecosterol, sitosterol, ergosterol, campesterol, stigmasterol, brassicasterol, tomatidine, ursolic acid, alpha-tocopherol, and any mixtures thereof.

[0219] E97. The method of any one of embodiments 92 to 96, wherein the delivery agent further comprises a PEG lipid.

[0220] E98. The method of embodiment 97, wherein the PEG lipid is selected from the group consisting of a PEG-modified phosphatidylethanolamine, a PEG-modified phosphatidic acid, a PEG-modified ceramide, a PEG-modified dialkylamine, a PEG-modified diacylglycerol, a PEG-modified dialkylglycerol, and any mixtures thereof.

[0221] E99. The method of any one of embodiments 92 to 98, wherein the delivery agent further comprises an ionizable lipid selected from the group consisting of 3-(didodecylamino)-N1,N1,4-tridodecyl-1-piperazineethanamine (KL10), N1-[2-(didodecylamino)ethyl]-N1,N4,N4-tridodecyl-1,4-piperazinediethanamine (KL22), 14,25-ditridecyl-15,18,21,24-tetraaza-octatriacontane (KL25), 1,2-dilinoleyloxy-N,N-dimethylaminopropane (DLin-DMA), 2,2-dilinoleyl-4-dimethylaminomethyl-[1,3]-dioxolane (DLin-K-DMA), heptatriaconta-6,9,28,31-tetraen-19-yl 4-(dimethylamino)butanoate (DLin-MC3-DMA), 2,2-dilinoleyl-4-(2-dimethylaminoethyl)-[1,3]-dioxolane (DLin-KC2-DMA), 1,2-dioleyloxy-N,N-dimethylaminopropane (DODMA), 2-({8-[(3β)-cholest-5-en-3-yloxy]octyl}oxy)-N,N-dimethyl-3-[(9Z,12Z)-octadeca-9,12-dien-1-yl oxy]propan-1-amine (Octyl-CLinDMA), (2R)-2-({8-[(3β)-cholest-5-en-3-yloxy]octyl}xy)-N,N-dimethyl-3-[(9Z,12Z)-octadeca-9,12-dien-1-yloxy]propan-1-amine (Octyl-CLinDMA (2R)), and (2S)-2-({8-[(3β)-cholest-5-en-3-yloxy]octyl}oxy)-N,N-dimethyl-3-[(9Z,12Z)-octadeca-9,12-dien-1-yloxy]propan-1-amine (Octyl-CLinDMA (2S)).

[0222] E100. The method of any one of embodiments 92 to 99, wherein the delivery agent further comprises a phospholipid, a structural lipid, a PEG lipid, or any combination thereof.

[0223] E101. The method of any one of embodiments 92-100, wherein the composition is formulated for in vivo delivery.

[0224] E102. The method of embodiment 101 which is formulated for intramuscular, subcutaneous, or intradermal delivery.

[0225] E103. The method of any one of embodiments 82-102 which increases cellular expression of MCM.

[0226] E104. The method of embodiment 103, wherein the cellular expression of MCM is increased by at least 20%, at least 25%, at least 30%, at least 35%, at least 40%, at least 45%, or at least 50%.

[0227] E105. The method of any one of embodiments 74 to 104, wherein the polynucleotide is administered at a dose of 0.1 mg/kg to 1.0 mg/kg, 0.1 mg/kg to 10 mg/kg, 0.1 mg/kg to 2 mg/kg, 0.1 mg/kg to 5 mg/kg, 1 mg/kg to 5 mg/kg, or 1 mg/kg to 3 mg/kg.

[0228] E106. The method of any one of embodiments 74 to 105, wherein the plasma MMA level after the administration is reduced at least 70%, at least 75%, at least 80%, at least 85%, at least 90%, or at least 95% compared to the plasma MMA level prior to the administration.

[0229] E107. The method of embodiment 106, wherein the plasma MMA level is reduced about 75% to 85% compared to the plasma MMA level prior to the administration.

[0230] E108. The method of any one of embodiments 74 to 107, wherein the plasma MMA level after the administration is lower than about 5 μmol/L, about 4.5 μmol/L, about 4 μmol/L, about 3.5 μmol/L, about 3 μmol/L, about 2.5 μmol/L, about 2 μmol/L, about 1.5 μmol/L, about 1 μmol/L, about 0.9 μmol/L, about 0.8 μmol/L, about 0.7 μmol/L, about 0.6 μmol/L, about 0.5 μmol/L, about 0.4 μmol/L, about 0.3 μmol/L, or 0.27 μmol/L.

[0231] E109. The method of embodiments 74 to 108, wherein the urinary MMA level is less than 2000 mmol/mol creatinine, less than 1900 mmol/mol creatinine, less than 1800 mmol/mol creatinine, less than 1700 mmol/mol creatinine, less than 1600 mmol/mol creatinine, less than 1500 mmol/mol creatinine, less than 1400 mmol/mol creatinine, less than 1300 mmol/mol creatinine, less than 1200 mmol/mol creatinine, less than 1100 mmol/mol creatinine, less than 1000 mmol/mol creatinine, 900 mmol/mol creatinine, 800 mmol/mol creatinine, 700 mmol/mol creatinine, 600 mmol/mol creatinine, 500 mmol/mol creatinine, 400 mmol/mol creatinine, 300 mmol/mol creatinine, 200 mmol/mol creatinine, 100 mmol/mol creatinine, 90 mmol/mol creatinine, 80 mmol/mol creatinine, 70 mmol/mol creatinine, 60 mmol/mol creatinine, 50 mmol/mol creatinine, 40 mmol/mol creatinine, 30 mmol/mol creatinine, 20 mmol/mol creatinine, 10 mmol/mol creatinine, 9 mmol/mol creatinine, 8 mmol/mol creatinine, 7 mmol/mol creatinine, 6 mmol/mol creatinine, 5 mmol/mol creatinine, 4 mmol/mol creatinine, 3 mmol/mol creatinine, 2 mmol/mol creatinine, or 1 mmol/mol creatinine.

### BRIEF DESCRIPTION OF THE DRAWINGS

[0232] FIG. 1 is a Western blot analysis of endogenous methylmalonyl-CoA mutase expression in a mouse liver mitochondrial extract, mouse cells (Hepa1-6), and human cells (HepG2, SNU423, and HeLa). The upper band (thin arrow) shows Mouse α-Methymalonyl-CoA mutase, and the lower band (thick arrow) shows Rabbit α-Citrate synthetase.

[0233] FIGS. 2A-2C show immunofluorescence analyses of the localization of endogenous methylmalonyl-CoA mutase in HeLa cells. FIG. 2A shows the location of mitochondria using Mitotracker and the nucleus using DAPI. FIG. 2B shows the immunostaining of hMCM protein using a murine monoclonal anti-MCM antibody and the location of the nucleus using DAPI.

[0234] FIG. 2C shows the merged picture of FIGS. 2A and 2B.

[0235] FIG. 3 is a Western blot analysis comparing methylmalonyl-CoA mutase expression in (i) HeLa cells transfected with a control GFP expression construct, (ii) HeLa cells transfected with a construct for expressing methylmalonyl-CoA mutase, and (iii) a mouse liver mitochondrial extract.

[0236] FIG. 4 is a comparison of methylmalonyl-CoA mutase enzymatic activity in (i) HeLa cells transfected with a control GFP expression construct, (ii) HeLa cells transfected with a construct for expressing methylmalonyl-CoA mutase, and (iii) a mouse liver mitochondrial extract.

[0237] FIG. 5 is a Western blot analysis of methylmalonyl-CoA mutase expression in Hepa1-6 cells, fibroblasts from normal human subjects (NHDF), and fibroblasts from MMA patients (GM50 and GM1573) that were transfected with control mRNA, human MCM mRNA, or mouse MCM mRNA.

[0238] FIGS. 6A-6D show immunofluorescence analyses of the localization of exogenously expressed methylmalonyl-CoA mutase in human fibroblasts transfected with eGFP mRNAs or MCM mRNAs (also referred to as “MUT”). The left panels show the location of mitochondria using Mitotracker and the nucleus using DAPI, the middle panels show shows the location of mitochondria using MCM protein and the nucleus using DAPI, and the right panels show merged images of the left panel and the right panel. FIGS. 6A and 6C are images taken of patient fibroblasts transfected with mRNA encoding eGFP. FIGS. 6B and 6D are images taken of patient fibroblasts transfected with mRNA encoding hMCM.

[0239] FIG. 7 is measurement of methylmalonyl-CoA mutase activity in Hepa1-6 cells, fibroblasts from normal human subjects (NHDF), and fibroblasts from MMA patients (GM50 and GM1573) that were transfected with control mRNA, human MCM mRNA, or mouse MCM mRNA.

[0240] FIGS. 8A-8B is an analysis of in vivo treatment with mRNA encoding methylmalonyl-CoA mutase. For FIGS. 8A and 8B, C57B/L6 mice were injected intravenously with either control mRNA (NT-FIX) or MCM mRNA at 0.5 mg mRNA/kg body weight (“mpk”). Mice were sacrificed after 24 or 48 hours and MCM protein in mitochondria from livers were determined by capillary electrophoresis (CE). The upper panel (FIG. 8A) shows injection of MCM mRNA increased MCM protein expression after 24 and 48 hours, while the lower panel (FIG. 8B) shows the expression of the control protein citrate synthase.

[0241] FIGS. 9-15 show exemplary codon optimized MCM sequences that encode methylmalonyl-CoA mutase. The illustrated sequences in FIGS. 9-15 are SEQ ID NOs: 732, 733, 734, 151, 152, 153, and 154, respectively.

[0242] FIGS. 16A-C show analysis of MMA levels and body weight in the MCK mouse model. FIG. 16A shows plasma levels of methylmalonic acid (MMA) in μM measured by LC-MS/MS over time in mice treated weekly with control mRNA (NT-FIX) at 0.1 mg/kg, codon optimized MCM mRNA (encoding SEQ ID NO:734) formulated in lipid nanoparticles at 0.16 or 0.2 mg/kg for 5 injections, or codon optimized MCM mRNA (encoding SEQ ID NO:734) formulated in lipid nanoparticles at 0.2 mg/kg for 2 injections. FIG. 16B shows the body weight of the mice over time (measured twice a week). ***p<0.001; P-values obtained from repeated measures ANOVA. FIG. 16C shows the increase in body weight over time in mice injected weekly with codon optimized MCM mRNA.

[0243] FIG. 17 shows MCM expression in liver of wild-type CD1 mice dosed with codon optimized MCM mRNA (SEQ ID NO: 734) formulated in lipid nanoparticles at 0.2 mg/kg compared to endogenous human MCM and endogenous mouse MCM.

[0244] FIGS. 18A-C show a time course of the effects of injection of codon optimized MCM mRNA. FIG. 18A shows levels of lipid nanoparticles after single dose injection of codon optimized MCM mRNA. FIG. 18B shows Hepatic hMut mRNA levels in mouse liver after single dose injection of codon optimized MCM mRNA. FIG. 18C shows MCM protein levels after single dose injection of codon optimized MCM mRNA

[0245] FIGS. 19A-B show MCM expression in livel of wild-type CD mice dosed with codon optimized MCM mRNAs, where the mRNA is formulated either with MC3 or Compound 18. NTFIX mRNA was used as a control. FIG. 19A shows a Western blot of expression after dosing with different formulations, and FIG. 19B shows a quantification of that Western blot.

[0246] FIGS. 20A-B show the effects of administering codon optimized MCM mRNA to mice on the plasma levels of MMA (FIG. 20A) and the body weight of the mice (FIG. 20B).

### DETAILED DESCRIPTION

[0247] The present disclosure provides polynucleotide sequences that encode a sequence-optimized nucleic acid encoding a methylmalonyl-CoA mutase polypeptide (“MCM” or “MUT”). MCM is the principal gene associated with methylmalonic acidemia (“MMA,” also referred to as methylmalonic adicuria). Wild type nucleic acid and amino acid sequences for human methylmalonyl-CoA mutase (MCM) are described in NCBI sequence records gi296010795 (reference sequence NM_000255.3, “Homo sapiens methylmalonyl-CoA mutase (MUT), mRNA”; see also, SEQ ID NO: 214) and gi156105689 (reference sequence NP_000246.2, “methylmalonyl-CoA mutase, mitochondrial precursor [Homo sapiens]”; see also, SEQ ID NO: 208), respectively. Accession numbers and the associated sequences are found at the National Center for Biotechnology Information (NCBI) website.

[0248] MCM is a metabolic enzyme (E.C. 5.4.99.2), the biological function of which is to isomerize L-methylmalonyl-CoA into succinyl-CoA, a Krebs cycle intermediate. MCM localizes to the mitochondria of cells, exists as a homodimer in its native form, and is adenosylcobalamin-dependent. The precursor form of human MCM is 750 amino acids, while its mature form is 718 amino acids—a 32 amino acid leader sequence is cleaved off by mitochondrial importation and processing machinery.

### I. Composition

### Polynucleotides Encoding MCM

[0249] In certain aspects, the present disclosure provides nucleic acid molecules, specifically polynucleotides that encode one or more MCM polypeptides. The MCM polypeptides that are encoded can be mammalian MCM polypeptides, for example, human MCM peptides, or functional fragments thereof.

[0250] In some embodiments, the polynucleotides described herein encode at least one methylmalonyl-CoA mutase protein, functional fragment, or variant thereof. MCM catalyzes enzymatic transformation of methylmalonyl-CoA into succinyl-CoA, and also comprises a cobalamin-binding domain. MCM's enzymatic activity is dependent on its binding to its cofactor, denosylcobalamin.

[0251] MCM plays a critical role in the catabolism of fat and protein, specifically in disposing of methylmalonyl-CoA created during metabolism. For example, methylmalonyl-CoA is an intermediate in the catabolism of amino acids such as isoleucine, methionine, and threonine. Methylmalonyl-CoA is also an intermediate in the catabolism of cholesterol and fatty acids. Defects in the activity of this enzyme lead to inefficient metabolism and buildup of potentially toxic metabolic intermediates such as methylmalonic acid. The lack of MCM causes the disorder known as methylmalonic acidemia (MMA).

[0252] Replacement of MCM has been theorized to be a cure of this form of MMA. In some embodiments, the polynucleotides disclosed herein comprise one or more sequences encoding a methylmalonyl-CoA mutase protein, functional fragment, or variant thereof that is suitable for use in such gene replacement therapy. In certain aspects, the present application addresses the problem of the lack of methylmalonyl-CoA mutase by providing a polynucleotide, e.g., mRNA, that encodes methylmalonyl-CoA mutase or functional fragment thereof, wherein the polynucleotide is sequence-optimized. In some embodiments, the polynucleotide, e.g., mRNA, increases MCM expression levels in cells when introduced into those cells, e.g., by at least 20%, at least 20%, at least 25%, at least 35%, at least 40%, at least 50%, at least 60%, at least 70%, at least 80%, at least 90%, or at least 100%.

[0253] In some embodiments, the polynucleotides of the disclosure encode functional MCM polypeptides or fragments thereof. In some embodiments, the polynucleotides of the disclosure encode an MCM protein or variant thereof that is full length (i.e., it includes a mitochondrial transit peptide, either native or heterologous to that in native full-length MCM), while in other embodiments polynucleotides of the disclosure encode a functional MCM protein or variant thereof that is mature (i.e., it lacks the mitochondrial transit peptide). In some embodiments, the polynucleotides encode a human MCM, or variant thereof, linked to a heterologous or homologous mitochondrial transit peptide.

[0254] In some embodiments, the polynucleotides of the disclosure encode functional human MCM (SEQ ID NO: 208, SEQ ID NO: 209, SEQ ID NO: 210, SEQ ID NO: 211, SEQ ID NO: 212, and SEQ ID NO: 213) or fragments thereof. In some embodiments, the polynucleotides of the disclosure encode mutant MCM. In some embodiments, the polynucleotides encode an MCM polypeptide that comprises at least one point mutation in the MCM sequence, while still retaining MCM enzymatic activity. In some embodiments, the polynucleotides encode a functional MCM polypeptide with mutations that do not alter the function of MCM. Such functional MCM can be referred to as function-neutral. In some embodiments, the encoded MCM polypeptide comprises one or more of the function-neutral point mutations V69, T499, H532, A598, and V671. In some embodiments, the polynucleotides of the disclosure encode the polypeptide sequences in SEQ ID NO: 209, SEQ ID NO: 210, SEQ ID NO: 211, SEQ ID NO: 212, and SEQ ID NO: 213, which contain the function-neutral mutants V69, T499, H532, A598, and V671, respectively. In particular embodiments, the encoded MCM polypeptide is a V671 mutant (SEQ ID NO: 213). Polynucleotides encoding MCM polypeptides are listed in SEQ ID NOs: 1 to 207, 214, 732 to 765, and 772.

[0255] In some embodiments, the polynucleotides comprise a nucleotide sequence having significant sequence similarity to a polynucleotide selected from the group of SEQ ID NOs: 1-207, 732-765, and 772, wherein the ORF encodes an MCM polypeptide. In some embodiments, the polynucleotide comprises a nucleotide sequence having significant sequence similarity to SEQ ID NOs: 151, 152, 153, 154, 732, 733, and 734 (FIGS. 9-15). In some embodiments, the polynucleotide comprises a nucleotide sequence having significant sequence similarity to SEQ ID NO: 734 (FIG. 11).

[0256] In some embodiments, the disclosure is directed to a polynucleotide comprising an ORF having at least 99% or 100% sequence identity to nucleotide 97 to nucleotide 2250 of SEQ ID NO: 734, wherein the ORF encodes an MCM polypeptide.

[0257] In some embodiments, the disclosure is directed to a polynucleotide comprising an ORF having at least 98%, at least 99%, or 100% sequence identity to nucleotide 97 to nucleotide 2250 of SEQ ID NO: 732, wherein the ORF encodes an MCM polypeptide.

[0258] In some embodiments, the disclosure is directed to a polynucleotide comprising an ORF having at least 92%, at least 93%, at least 94%, at least 95%, at least 96%, at least 97%, at least 98%, at least 99%, or 100% sequence identity to a sequence selected from the group consisting of nucleotides 97 to nucleotides 2250 of SEQ ID NOs: 182, 733, and 741, wherein the ORF encodes an MCM polypeptide.

[0259] In some embodiments, the disclosure is directed to a polynucleotide comprising an ORF having at least 91%, at least 92%, at least 93%, at least 94%, at least 95%, at least 96%, at least 97%, at least 98%, at least 99%, or 100% sequence identity to a sequence selected from the group consisting of nucleotides 97 to nucleotides 2250 of SEQ ID NOs: 735, 736, 738, 743, 744, 748, 749, 750, 754, 755, 758, 762, and 765, wherein the ORF encodes an MCM polypeptide.

[0260] In some embodiments, the disclosure is directed to a polynucleotide comprising an ORF having at least 90%, at least 91%, at least 92%, at least 93%, at least 94%, at least 95%, at least 96%, at least 97%, at least 98%, at least 99%, or 100% sequence identity to a sequence selected from the group consisting of nucleotides 97 to nucleotides 2250 of SEQ ID NOs: 180, 187, 737, 739, 740, 742, 745, 746, 747, 751, 752, 753, 757, 759, 760, 761, 763, and 764, wherein the ORF encodes an MCM polypeptide.

[0261] In some embodiments, the disclosure is directed to a polynucleotide comprising an ORF having at least 89%, at least 90%, at least 91%, at least 92%, at least 93%, at least 94%, at least 95%, at least 96%, at least 97%, at least 98%, at least 99%, or 100% sequence identity to a sequence selected from the group consisting of nucleotides 97 to nucleotides 2250 of SEQ ID NO: 181 and 756, wherein the ORF encodes an MCM polypeptide.

[0262] In some embodiments, the disclosure is directed to a polynucleotide comprising an ORF having at least 88%, at least 89%, at least 90%, at least 91%, at least 92%, at least 93%, at least 94%, at least 95%, at least 96%, at least 97%, at least 98%, at least 99%, or 100% sequence identity to a sequence selected from the group consisting of nucleotides 97 to nucleotides 2250 of SEQ ID NO: 154, 165, 171, 173, and 175, wherein the ORF encodes an MCM polypeptide.

[0263] In some embodiments, the disclosure is directed to a polynucleotide comprising an ORF having at least 87%, at least 88%, at least 89%, at least 90%, at least 91%, at least 92%, at least 93%, at least 94%, at least 95%, at least 96%, at least 97%, at least 98%, at least 99%, or 100% sequence identity to a sequence selected from the group consisting of nucleotides 97 to nucleotides 2250 of SEQ ID NO: 151, 152, 153, 163, 164, 166, 167, 168, 169, 170, 172, 177, 178, 179, 195, and 204, wherein the ORF encodes an MCM polypeptide.

[0264] In some embodiments, the disclosure is directed to a polynucleotide comprising an ORF having at least 86%, at least 87%, at least 88%, at least 89%, at least 90%, at least 91%, at least 92%, at least 93%, at least 94%, at least 95%, at least 96%, at least 97%, at least 98%, at least 99%, or 100% sequence identity to a sequence selected from the group consisting of nucleotides 97 to nucleotides 2250 of SEQ ID NOs: 156, 157, 158, 159, 160, 161, 162, 174 and 176, wherein the ORF encodes an MCM polypeptide.

[0265] In some embodiments, the disclosure is directed to a polynucleotide comprising an ORF having at least 85%, at least 86%, at least 87%, at least 88%, at least 89%, at least 90%, at least 91%, at least 92%, at least 93%, at least 94%, at least 95%, at least 96%, at least 97%, at least 98%, at least 99%, or 100% sequence identity to a sequence selected from the group consisting of nucleotides 97 to nucleotides 2250 of SEQ ID NOs: 155 and 203, wherein the ORF encodes an MCM polypeptide.

[0266] In some embodiments, the disclosure is directed to a polynucleotide comprising an ORF having at least 82%, at least 83%, at least 84%, at least 85%, at least 86%, at least 87%, at least 88%, at least 89%, at least 90%, at least 91%, at least 92%, at least 93%, at least 94%, at least 95%, at least 96%, at least 97%, at least 98%, at least 99%, or 100% sequence identity to a sequence selected from the group consisting of nucleotides 97 to nucleotides 2250 of SEQ ID NOs: 64, 66, 71, 91, and 128, wherein the ORF encodes an MCM polypeptide.

[0267] In some embodiments, the disclosure is directed to a polynucleotide comprising an ORF having at least 81%, at least 82%, at least 83%, at least 84%, at least 85%, at least 86%, at least 87%, at least 88%, at least 89%, at least 90%, at least 91%, at least 92%, at least 93%, at least 94%, at least 95%, at least 96%, at least 97%, at least 98%, at least 99%, or 100% sequence identity to a sequence selected from the group consisting of nucleotides 97 to nucleotides 2250 of SEQ ID NOs: 9, 11, 18, 19, 21, 22, 23, 24, 32, 33, 37, 39, 40, 44, 45, 47, 50, 51, 52, 55, 57, 61, 65, 70, 79, 84, 86, 88, 90, 92, 98, 100, 115, 117, 126, 129, 135, 136, 137, 144, 148, 150, 184, 190, 191, and 206, wherein the ORF encodes an MCM polypeptide.

[0268] In some embodiments, the disclosure is directed to a polynucleotide comprising an ORF having at least 80%, at least 81%, at least 82%, at least 83%, at least 84%, at least 85%, at least 86%, at least 87%, at least 88%, at least 89%, at least 90%, at least 91%, at least 92%, at least 93%, at least 94%, at least 95%, at least 96%, at least 97%, at least 98%, at least 99%, or 100% sequence identity to a sequence selected from the group consisting of nucleotides 97 to nucleotides 2250 of SEQ ID NOs: 3, 5, 6, 8, 10, 12, 14, 16, 17, 20, 27, 28, 29, 31, 34, 35, 36, 38, 41, 42, 43, 46, 48, 49, 53, 54, 56, 58, 60, 63, 68, 69, 74, 77, 78, 80, 83, 85, 87, 93, 95, 96, 97, 99, 102, 103, 104, 105, 107, 110, 112, 113, 114, 116, 119, 120, 122, 123, 124, 125, 127, 131, 132, 133, 134, 138, 139, 140, 141, 142, 143, 147, 149, 183, 186, 188, 189, 192, 193, 194, 196, 197, 198, 199, 200, 201, 202, 205, and 207, wherein the ORF encodes an MCM polypeptide.

[0269] In some embodiments, the disclosure is directed to a polynucleotide comprising an ORF having at least 79%, at least 80%, at least 81%, at least 82%, at least 83%, at least 84%, at least 85%, at least 86%, at least 87%, at least 88%, at least 89%, at least 90%, at least 91%, at least 92%, at least 93%, at least 94%, at least 95%, at least 96%, at least 97%, at least 98%, at least 99%, or 100% sequence identity to a sequence selected from the group consisting of nucleotides 97 to nucleotides 2250 of SEQ ID NOs: 1, 2, 4, 7, 13, 15, 25, 26, 30, 59, 62, 67, 72, 73, 75, 76, 81, 82, 89, 94, 101, 106, 108, 109, 111, 118, 121, 130, 145, 146, and 185, wherein the ORF encodes an MCM polypeptide.

[0270] The polynucleotides of the disclosure can also encode additional features that facilitate trafficking of the polypeptides to therapeutically relevant sites. One such feature that aids in protein trafficking is the signal sequence, or targeting sequence. The peptides encoded by these signal sequences are known by a variety of names, including targeting peptides, transit peptides, and signal peptides. The disclosure also includes a polynucleotide comprising a sequence that encodes a mitochondrial transit peptide operably linked to the polynucleotide described herein, i.e., linked to a polynucleotide comprising an ORF encoding an MCM polypeptide.

[0271] As used herein, a “signal sequence” or “signal peptide” is a polynucleotide or polypeptide, respectively, which is from about 9 to 200 nucleotides (3-70 amino acids) in length that, in some embodiments, is incorporated at the 5′ (or N-terminus) of the coding region or polypeptide encoded, respectively. Addition of these sequences result in trafficking of the encoded polypeptide to a desired site, such as the endoplasmic reticulum or the mitochondria through one or more targeting pathways. Some signal peptides are cleaved from the protein, for example by a signal peptidase after the proteins are transported.

[0272] For example, human MCM's precursor protein comprises a 32-amino acid mitochondrial transit peptide, also referred to as an MCM mitochondrial targeting sequence or mitochondrial targeting peptide, that facilitates delivery of the MCM protein to, and localization in, mitochondria. The present disclosure comprises both polynucleotides that encode a homologous targeting sequence (i.e., MCM's native mitochondrial transit sequence) and polynucleotides that encode a heterologous mitochondrial transit sequences (i.e., a mitochondrial transit peptide that is not the native targeting peptide for the operably linked MCM protein). In some embodiments, the alternate targeting sequences facilitate delivery of MCM to mitochondria.

[0273] Exemplary sequences of known mitochondrial transit peptides include MLSLRQSIRFFKPATRTLCSSRYLL (SEQ ID NO: 251), MALLRGVFVVAAKRTP (SEQ ID NO: 252) and MLRIPVRKALVGLSKSSKGCVRT (SEQ ID NO: 253). Non-limiting examples of the mitochondrial transit peptides are listed below in Table 1 (SEQ ID NOs: 251-265). Further examples of mitochondrial transit peptides are provided as SEQ ID NOs: 270-719. Additional mitochondrial transit peptides that can be utilized in the present disclosure can be identified using predictive tools known in the art. For example, mitochondrial targeting can be analyzed using the methods described in Fukusawa et al., Molecular and Cellular Proteomics 14:1113-1126 (2015), the contents of which are incorporated herein in their entirety.

TABLE 1
Mitochondrial Transit Peptides

| ID | | |
|---|---|---|
| (SEQ ID NO) | Name of the protein | Sequence |
| COX4 | Saccharomyces cerevisiae mitochondrial | MLSLRQSIRFFKPATRTLCSSRYLL |
| (SEQ ID NO: | cytochrome c oxidase subunit IV | |
| 251) | | |
| ACAA2 | Mitochondrial 3-ketoacyl-coa thiolase | MALLRGVFVVAAKRTP |
| (SEQ ID NO: | | |
| 252) | | |
| NDUFS1 | NADH-ubiquinone oxidoreductase 75 kDa | MLRIPVRKALVGLSKSSKGCVRT |
| (SEQ ID NO: | subunit, mitochondrial isoform 2 | |
| 253) | | |
| A6NK58 | Putative lipoyltransferase 2, mitochondrial (EC | MRQPAVRLVRLGRVPYAELLGLQDRWLR |
| (SEQ ID NO: | 2.3.1.181) (Lipoate-protein ligase B) | RLQ |
| 254) | (Lipoyl/octanoyl transferase) (OctanoyL-[acyl- | |
| | carrier-protein]-protein N-octanoyltransferase) | |
| A8K5M9 | Uncharacterized protein C15orf62, | METWRKGSFRN |
| (SEQ ID NO: | mitochondrial | |
| 255) | | |
| A8MUP2 | Methyltransferase-like protein 12, | MAALRRMLHLPSLMMGTCRPFAGSLADS |
| (SEQ ID NO: | mitochondrial (EC 2.1.1.—) | |
| 256) | | |
| O00142 | Thymidine kinase 2, mitochondrial (EC | MLLWPLRGWAARALRCFGPGSRGSPASG |
| (SEQ ID NO: | 2.7.1.21) (Mt-TK) | PGPRR |
| 257) | | |
| O00217 | NADH dehydrogenase [ubiquinone] iron- | MRCLTTPMLLRALAQAARAGPPGGRSLH |
| (SEQ ID NO: | sulfur protein 8, mitochondrial (EC 1.6.5.3) | SSAVAA |
| 258) | (EC 1.6.99.3) (Complex I-23 kD) (CI-23 kD) | |
| | (NADH-ubiquinone oxidoreductase 23 kDa | |
| | subunit) (TYKY subunit) | |
| O00330 | Pyruvate dehydrogenase protein X component, | MAASWRLGCDPRLLRYLVGFPGRRSVGL |
| (SEQ ID NO: | mitochondrial (Dihydrolipoamide | VKGALGWSVSRGANWRWFHSTQWLR |
| 259) | dehydrogenase-binding protein of pyruvate | |
| | dehydrogenase complex) (E3-binding protein) | |
| | (E3BP) (Lipoyl-containing pyruvate | |
| | dehydrogenase complex component X) (proX) | |
| O00411 | DNA-directed RNA polymerase, | MSALCWGRGAAGLKRALRPCGRPGLPGK |
| (SEQ ID NO: | mitochondrial (MtRPOL) (EC 2.7.7.6) | EGTAGGVCGPRRS |
| 260) | | |
| O00746 | Nucleoside diphosphate kinase, mitochondrial | MGGLFWRSALRGLRCGPRAPGPSLLVRH |
| (SEQ ID NO: | (NDK) (NDP kinase, mitochondrial) (EC | GSGGP |
| 261) | 2.7.4.6) (Nucleoside diphosphate kinase D) | |
| | (NDPKD) (nm23-H4) | |
| O14521 | Succinate dehydrogenase [ubiquinone] | MAVLWRLSAVCGALGGRALLLRTPVVRP |
| (SEQ ID NO: | cytochrome b small subunit, mitochondrial | AHISAFLQDRPIPEWCGVQHIHLSPSHH |
| 262) | (CybS) (CII-4) (QPs3) (Succinate | |
| | dehydrogenase complex subunit D) (Succinate- | |
| | ubiquinone oxidoreductase cytochrome b small | |
| | subunit) (Succinate-ubiquinone reductase | |
| | membrane anchor subunit) | |
| O14548 | Cytochrome c oxidase subunit 7A-related | MYYKFSGFTQKLAGAWASEAYSPQGLKP |
| (SEQ ID NO: | protein, mitochondrial (COX7a-related | VVSTEAPPIIFATPTKLTSDSTVYDYA |
| 263) | protein) (Cytochrome c oxidase subunit VIIa- | |
| | related protein) (EB1) | |
| mMCM | Mouse methylmalonyl-CoA mutase | MLRAKNQLFLLSPHYLKQLNIPSASRWK |
| (SEQ ID | | RL |
| NO: 264) | | |
| hMCM | Human methylmalonyl-CoA mutase | MLRAKNQLFLLSPHYLRQVKESSGSRLI |
| (SEQ ID | | QQRL |
| NO: 265) | | |

[0274] In some embodiments, the nucleic acid sequence encoding a mitochondrial transit peptide has at least about 70%, at least about 80%, at least about 90%, at least about 95%, at least about 96%, at least about 97%, at least about 98%, at least about 99%, or about 100% sequence identity to a sequence selected from the group of nucleotides 1 to 96 of SEQ ID NOs: 1-207, 732-765, and 772, wherein the transit peptide is capable of targeting or carrying the MCM polypeptide into the mitochondria.

[0275] In some embodiments, the nucleic acid sequence encoding a mitochondrial transit peptide has at least about 70%, at least about 80%, at least about 90%, at least about 95%, at least about 96%, at least about 97%, at least about 98%, at least about 99%, or about 100% sequence identity to a sequence in Table 1 (SEQ ID NOs: 251, 252, 253, 254, 255, 256, 257, 258, 259, 260, 261, 262, 263, 264, or 265), wherein the transit peptide is capable of targeting or carrying the MCM polypeptide into the mitochondria. In some embodiments, the nucleic acid sequence encoding a mitochondrial transit peptide has at least about 70%, at least about 80%, at least about 90%, at least about 95%, at least about 96%, at least about 97%, at least about 98%, at least about 99%, or about 100% sequence identity to a sequence selected from the group consisting of SEQ ID NOs: 270 to 719, wherein the transit peptide is capable of targeting or carrying the MCM polypeptide into the mitochondria.

[0276] In some embodiments, the disclosure is directed to a polynucleotide comprising an ORF having at least 99% or 100% sequence identity to nucleotide 1 to nucleotide 2250 of SEQ ID NO: 734, wherein the ORF encodes an MCM polypeptide.

[0277] In some embodiments, the disclosure is directed to a polynucleotide comprising an ORF having at least 98%, at least 99%, or 100% sequence identity to nucleotide 1 to nucleotide 2250 of SEQ ID NO: 732, wherein the ORF encodes an MCM polypeptide.

[0278] In some embodiments, the disclosure is directed to a polynucleotide comprising an ORF having at least 92%, at least 93%, at least 94%, at least 95%, at least 96%, at least 97%, at least 98%, at least 99%, or 100% sequence identity to a sequence selected from the group consisting of nucleotides 1 to nucleotides 2250 of SEQ ID NO: 182 and 733, wherein the ORF encodes an MCM polypeptide.

[0279] In some embodiments, the disclosure is directed to a polynucleotide comprising an ORF having at least 91%, at least 92%, at least 93%, at least 94%, at least 95%, at least 96%, at least 97%, at least 98%, at least 99%, or 100% sequence identity to a sequence selected from the group consisting of nucleotides 1 to nucleotides 2250 of SEQ ID NOs: 735, 741, 743, 744, 748, 758, 762, and 765, wherein the ORF encodes an MCM polypeptide.

[0280] In some embodiments, the disclosure is directed to a polynucleotide comprising an ORF having at least 90%, at least 91%, at least 92%, at least 93%, at least 94%, at least 95%, at least 96%, at least 97%, at least 98%, at least 99%, or 100% sequence identity to a sequence selected from the group consisting of nucleotides 1 to nucleotides 2250 of SEQ ID NOs: 180, 181, 736, 738, 739, 740, 742, 746, 747, 749, 750, 751, 752, 753, 754, 755, 757, 759, 760, 761, and 763, wherein the ORF encodes an MCM polypeptide.

[0281] In some embodiments, the disclosure is directed to a polynucleotide comprising an ORF having at least 89%, at least 90%, at least 91%, at least 92%, at least 93%, at least 94%, at least 95%, at least 96%, at least 97%, at least 98%, at least 99%, or 100% sequence identity to a sequence selected from the group consisting of nucleotides 1 to nucleotides 2250 of SEQ ID NO: 745, 756, and 764, wherein the ORF encodes an MCM polypeptide.

[0282] In some embodiments, the disclosure is directed to a polynucleotide comprising an ORF having at least 88%, at least 89%, at least 90%, at least 91%, at least 92%, at least 93%, at least 94%, at least 95%, at least 96%, at least 97%, at least 98%, at least 99%, or 100% sequence identity to a sequence selected from the group consisting of nucleotides 1 to nucleotides 2250 of SEQ ID NO: 154, 165, 171, 173, and 175, wherein the ORF encodes an MCM polypeptide.

[0283] In some embodiments, the disclosure is directed to a polynucleotide comprising an ORF having at least 87%, at least 88%, at least 89%, at least 90%, at least 91%, at least 92%, at least 93%, at least 94%, at least 95%, at least 96%, at least 97%, at least 98%, at least 99%, or 100% sequence identity to a sequence selected from the group consisting of nucleotides 1 to nucleotides 2250 of SEQ ID NO: 151, 152, 153, 163, 166, 167, 168, 169, 170, 172, 177, 178, 179, 187, and 204, wherein the ORF encodes an MCM polypeptide.

[0284] In some embodiments, the disclosure is directed to a polynucleotide comprising an ORF having at least 86%, at least 87%, at least 88%, at least 89%, at least 90%, at least 91%, at least 92%, at least 93%, at least 94%, at least 95%, at least 96%, at least 97%, at least 98%, at least 99%, or 100% sequence identity to a sequence selected from the group consisting of nucleotides 1 to nucleotides 2250 of SEQ ID NO: 156, 157, 158, 159, 160, 162, 164, 174, 176, 195, and 737, wherein the ORF encodes an MCM polypeptide.

[0285] In some embodiments, the disclosure is directed to a polynucleotide comprising an ORF having at least 85%, at least 86%, at least 87%, at least 88%, at least 89%, at least 90%, at least 91%, at least 92%, at least 93%, at least 94%, at least 95%, at least 96%, at least 97%, at least 98%, at least 99%, or 100% sequence identity to a sequence selected from the group consisting of nucleotides 1 to nucleotides 2250 of SEQ ID NOs: 155, 161, and 203, wherein the ORF encodes an MCM polypeptide.

[0286] In some embodiments, the disclosure is directed to a polynucleotide comprising an ORF having at least 82%, at least 83%, at least 84%, at least 85%, at least 86%, at least 87%, at least 88%, at least 89%, at least 90%, at least 91%, at least 92%, at least 93%, at least 94%, at least 95%, at least 96%, at least 97%, at least 98%, at least 99%, or 100% sequence identity to a sequence selected from the group consisting of nucleotides 1 to nucleotides 2250 of SEQ ID NOs: 71 and 128, wherein the ORF encodes an MCM polypeptide.

[0287] In some embodiments, the disclosure is directed to a polynucleotide comprising an ORF having at least 81%, at least 82%, at least 83%, at least 84%, at least 85%, at least 86%, at least 87%, at least 88%, at least 89%, at least 90%, at least 91%, at least 92%, at least 93%, at least 94%, at least 95%, at least 96%, at least 97%, at least 98%, at least 99%, or 100% sequence identity to a sequence selected from the group consisting of nucleotides 1 to nucleotides 2250 of SEQ ID NOs: 4, 6, 8, 9, 11, 19, 22, 23, 24, 32, 33, 37, 40, 44, 45, 47, 51, 61, 64, 65, 66, 79, 84, 86, 90, 91, 92, 100, 101, 112, 115, 117, 126, 129, 135, 136, 146, 148, 184, 190, and 191, wherein the ORF encodes an MCM polypeptide.

[0288] In some embodiments, the disclosure is directed to a polynucleotide comprising an ORF having at least 80%, at least 81%, at least 82%, at least 83%, at least 84%, at least 85%, at least 86%, at least 87%, at least 88%, at least 89%, at least 90%, at least 91%, at least 92%, at least 93%, at least 94%, at least 95%, at least 96%, at least 97%, at least 98%, at least 99%, or 100% sequence identity to a sequence selected from the group consisting of nucleotides 1 to nucleotides 2250 of SEQ ID NOs: 2, 3, 5, 7, 10, 12, 13, 14, 15, 16, 18, 20, 21, 26, 27, 28, 29, 31, 34, 36, 38, 39, 41, 42, 43, 46, 48, 49, 52, 53, 54, 55, 56, 57, 58, 59, 60, 62, 68, 69, 70, 72, 73, 74, 76, 77, 80, 83, 85, 88, 95, 96, 97, 98, 102, 104, 105, 106, 107, 108, 109, 110, 113, 114, 120, 121, 122, 123, 124, 127, 131, 132, 133, 134, 137, 138, 139, 140, 141, 142, 144, 145, 147, 149, 150, 186, 188, 189, 192, 193, 194, 196, 198, 199, 200, 202, 205, 206, and 207, wherein the ORF encodes an MCM polypeptide.

[0289] In some embodiments, the disclosure is directed to a polynucleotide comprising an ORF having at least 79%, at least 80%, at least 81%, at least 82%, at least 83%, at least 84%, at least 85%, at least 86%, at least 87%, at least 88%, at least 89%, at least 90%, at least 91%, at least 92%, at least 93%, at least 94%, at least 95%, at least 96%, at least 97%, at least 98%, at least 99%, or 100% sequence identity to a sequence selected from the group consisting of nucleotides 1 to nucleotides 2250 of SEQ ID NOs: 1, 17, 25, 30, 35, 50, 63, 67, 75, 78, 81, 82, 87, 89, 93, 94, 99, 103, 111, 116, 118, 119, 125, 130, 143, 183, 185, 197, and 201, wherein the ORF encodes an MCM polypeptide.

[0290] In some embodiments, the polynucleotide includes from about 1500 to about 100,000 nucleotides (e.g., from about 1500 to 2500, from about 1800 to about 2600, from about 1900 to about 2600, from about 2000 to about 2700, from 2154 to 2,750, from 2154 to 3,000, from 2154 to 5,000, from 2154 to 7,000, from 2154 to 10,000, from 2154 to 25,000, from 2154 to 50,000, from 2154 to 70,000, from 2154 to 100,000, from 2250 to 2750, from 2250 to 3,000, from 2250 to 5,000, from 2250 to 7,000, from 2250 to 10,000, from 2250 to 25,000, from 2250 to 50,000, from 2250 to 70,000, and from 2250 to 100,000 nucleotides).

[0291] In some embodiments, the polynucleotides of the present disclosure can further comprise at least one nucleic acid sequence that is non-coding.

[0292] In some embodiments, the length of a region encoding at least one polypeptide of interest is greater than about 2154 nucleotides in length (e.g., at least or greater than about 2154, 2,250, 2,500, 3,000, 4,000, 4,100, 4,200, 4,300, 4,400, 4,500, 4,600, 4,700, 4,800, 4,900, 5,000, 5,100, 5,200, 5,300, 5,400, 5,500, 5,600, 5,700, 5,800, 5,900, 6,000, 7,000, 8,000, 9,000, 10,000, 20,000, 30,000, 40,000, 50,000, 60,000, 70,000, 80,000, 90,000 or up to and including 100,000 nucleotides). As used herein, such a region can be referred to as a “coding region” or “region encoding.”

[0293] In some embodiments, the polynucleotides of the present disclosure are, or function as, a messenger RNA (mRNA). As used herein, the term “messenger RNA” (mRNA) refers to any polynucleotide that encodes at least one polypeptide of interest and that is capable of being translated to produce the encoded polypeptide of interest in vitro, in vivo, in situ or ex vivo. Exemplary mRNAs that can be used are listed in SEQ ID NOs: 776-771.

### Optimized Polynucleotides Encoding MCM

[0294] The polynucleotides of the disclosure, their regions or parts or subregions are sequence-optimized. Sequence optimization methods are known in the art and can be useful to achieve one or more desired results. These results include to match codon frequencies in target and host organisms to ensure proper folding, bias GC content to increase mRNA stability or reduce secondary structures, minimize tandem repeat codons or base runs that can impair gene construction or expression, customize transcriptional and translational control regions, insert or remove protein trafficking sequences, remove/add post translation modification sites in encoded protein (e.g., glycosylation sites), add, remove or shuffle protein domains, insert or delete restriction sites, modify ribosome binding sites and mRNA degradation sites, to adjust translational rates to allow the various domains of the protein to fold properly, or to reduce or eliminate problem secondary structures within the polynucleotide. Sequence optimization tools, algorithms and services are known in the art, non-limiting examples include services from GeneArt (Life Technologies), DNA2.0 (Menlo Park Calif.) and/or proprietary methods. In some embodiments, the ORF sequence is optimized using optimization algorithms. Codon options for each amino acid are given in Table 2.

TABLE 2
Codon Options

| Amino Acid | Single Letter Code | Codon Options |
|---|---|---|
| Isoleucine | I | ATT, ATC, ATA |
| Leucine | L | CTT, CTC, CTA, CTG, TTA, TTG |
| Valine | V | GTT, GTC, GTA, GTG |
| Phenylalanine | F | TTT, TTC |
| Methionine | M | ATG |
| Cysteine | C | TGT, TGC |
| Alanine | A | GCT, GCC, GCA, GCG |
| Glycine | G | GGT, GGC, GGA, GGG |
| Proline | P | CCT, CCC, CCA, CCG |
| Threonine | T | ACT, ACC, ACA, ACG |
| Serine | S | TCT, TCC, TCA, TCG, AGT, AGC |
| Tyrosine | Y | TAT, TAC |
| Tryptophan | W | TGG |
| Glutamine | Q | CAA, CAG |
| Asparagine | N | AAT, AAC |
| Histidine | H | CAT, CAC |
| Glutamic acid | E | GAA, GAG |
| Aspartic acid | D | GAT, GAC |
| Lysine | K | AAA, AAG |
| Arginine | R | CGT, CGC, CGA, CGG, AGA, AGG |
| Selenocysteine | Sec | UGA in mRNA in presence of |
| | | Selenocysteine insertion element (SECIS) |
| Stop codons | Stop | TAA, TAG, TGA |

[0295] In some embodiments, the percentage of uracil or thymine nucleobases in a sequence-optimized nucleotide sequence (e.g., encoding an MCM polypeptide, a functional fragment, or a variant thereof) is modified (e.g., reduced) with respect to the percentage of uracil or thymine nucleobases in the reference wild-type nucleotide sequence. Such a sequence is referred to as a uracil-modified or thymine-modified sequence. The percentage of uracil or thymine content in a nucleotide sequence can be determined by dividing the number of uracils or thymines in a sequence by the total number of nucleotides and multiplying by 100. In some embodiments, the sequence-optimized nucleotide sequence has a lower uracil or thymine content than the uracil or thymine content in the reference wild-type sequence. In some embodiments, the uracil or thymine content in a sequence-optimized nucleotide sequence of the disclosure is greater than the uracil or thymine content in the reference wild-type sequence and still maintain beneficial effects, e.g., increased expression and/or reduced Toll-Like Receptor (TLR) response when compared to the reference wild-type sequence.

[0296] The uracil or thymine content of wild-type MCM is about 26.67%. In some embodiments, the uracil or thymine content of a uracil- or thymine-modified sequence encoding an MCM polypeptide is less than 26.67%. In some embodiments, the uracil or thymine content of a uracil- or thymine-modified sequence encoding an MCM polypeptide of the disclosure is less than 19%, less that 18%, less than 17%, less than 16%, less than 15%, less than 14%, less than 13%, less than 12%, less than 11%, or less than 10%. In some embodiments, the uracil or thymine content is not less than 18%, 17%, 16%, 15%, 14%, 13%, 12%, or 11%. The uracil or thymine content of a sequence disclosed herein, i.e., its total uracil or thymine content, is abbreviated herein as % U_{TL} or % T_{TL}.

[0297] In some embodiments, the uracil or thymine content (% U_{TL} or % T_{TL}) of a uracil- or thymine-modified sequence encoding an MCM polypeptide of the disclosure is between 11% and 26%, between 12% and 25%, between 12% and 24%, between 13% and 23%, between 13% and 22%, between 14% and 21%, between 14% and 20%, between 14% and 19%, between 14% and 18%, between 14% and 17%, or between 14% and 16%.

[0298] In some embodiments, the uracil or thymine content (% U_{TL} or % T_{TL}) of a uracil- or thymine-modified sequence encoding an MCM polypeptide of the disclosure is between 13% and 17%, between 13% and 16%, or between 14% and 16%.

[0299] In a particular embodiment, the uracil or thymine content (% U_{TL} or % T_{TL}) of a uracil- or thymine modified sequence encoding an MCM polypeptide of the disclosure is between about 14% and about 16%, e.g., between 14% and 15%.

[0300] A uracil- or thymine-modified sequence encoding an MCM polypeptide of the disclosure can also be described according to its uracil or thymine content relative to the uracil or thymine content in the corresponding wild-type nucleic acid sequence (% U_{WT} or % T_{WT}), or according to its uracil or thymine content relative to the theoretical minimum uracil or thymine content of a nucleic acid encoding the wild-type protein sequence (% U_{TM} or (% T_{TM}).

[0301] The phrases “uracil or thymine content relative to the uracil or thymine content in the wild type nucleic acid sequence,” refers to a parameter determined by dividing the number of uracils or thymines in a sequence-optimized nucleic acid by the total number of uracils or thymines in the corresponding wild-type nucleic acid sequence and multiplying by 100. This parameter is abbreviated herein as % U_{WT} or % T_{WT}.

[0302] In some embodiments, the % U_{WT} or % T_{WT} of a uracil- or thymine-modified sequence encoding an MCM polypeptide of the disclosure is above 50%, above 55%, above 60%, above 65%, above 70%, above 75%, above 80%, above 85%, above 90%, or above 95%.

[0303] In some embodiments, the % U_{WT} or % T_{WT} of a uracil- or thymine modified sequence encoding an MCM polypeptide of the disclosure is between 42% and 68%, between 43% and 67%, between 44% and 66%, between 45% and 65%, between 46% and 64%, between 47% and 63%, between 48% and 62%, between 49% and 61%, between 50% and 60%, between 51% and 59%, or between 52% and 58%.

[0304] In some embodiments, the % U_{WT} or % T_{WT} of a uracil- or thymine-modified sequence encoding an MCM polypeptide of the disclosure is between 51% and 60%, between 51% and 59%, between 52% and 59%, between 52% and 58%, or between 53% and 58%.

[0305] In a particular embodiment, the % U_{WT} or % T_{WT} of a uracil- or thymine-modified sequence encoding an MCM polypeptide of the disclosure is between about 53% and about 58%.

[0306] Uracil- or thymine-content relative to the uracil or thymine theoretical minimum, refers to a parameter determined by dividing the number of uracils or thymines in a sequence-optimized nucleotide sequence by the total number of uracils or thymines in a hypothetical nucleotide sequence in which all the codons in the hypothetical sequence are replaced with synonymous codons having the lowest possible uracil or thymine content and multiplying by 100. This parameter is abbreviated herein as % U_{TM} or % T_{TM}

[0307] For DNA it is recognized that thymine is present instead of uracil, and one would substitute T where U appears. Thus, all the disclosures related to, e.g., % U_{TM}, % U_{WT}, or % U_{TL}, with respect to RNA are equally applicable to % U_{TM}% T_{WT}, or % T_{TL} with respect to DNA.

[0308] In some embodiments, the % U_{TM} of a uracil-modified sequence encoding an MCM polypeptide of the disclosure is below 300%, below 295%, below 290%, below 285%, below 280%, below 275%, below 270%, below 265%, below 260%, below 255%, below 250%, below 245%, below 240%, below 235%, below 230%, below 225%, below 220%, below 215%, below 200%, below 195%, below 190%, below 185%, below 180%, below 175%, below 170%, below 165%, below 160%, below 155%, below 150%, below 145%, below 140%, below 139%, below 138%, below 137%, below 136%, below 135%, below 134%, below 133%, below 132%, below 131%, below 130%, below 129%, below 128%, below 127%, below 126%, below 125%, below 124%, below 123%, below 122%, below 121%, below 120%, below 119%, below 118%, or below 117%.

[0309] In some embodiments, the % U_{TM} of a uracil-modified sequence encoding an MCM polypeptide of the disclosure is above 100%, above 101%, above 102%, above 103%, above 104%, above 105%, above 106%, above 107%, above 108%, above 109%, above 110%, above 111%, above 112%, above 113%, above 114%, above 115%, above 116%, above 117%, above 118%, above 119%, above 120%, above 121%, above 122%, above 123%, above 124%, above 125%, or above 126%, above 127%, above 128%, or above 129%.

[0310] In some embodiments, the % U_{TM} of a uracil-modified sequence encoding an MCM polypeptide of the disclosure is between 123% and 125%, between 122% and 126%, between 121% and 127%, between 120% and 128%, between 119% and 129%, between 118% and 130%, between 117% and 131%, between 116% and 132%, between 115% and 133%, between 114% and 134%, between 113% and 135%, between 112% and 136%, or between 111% and 137%.

[0311] In some embodiments, the % U_{TM} of a uracil-modified sequence encoding an MCM polypeptide of the disclosure is between about 118% and about 129%.

[0312] In some embodiments, a uracil-modified sequence encoding an MCM polypeptide of the disclosure has a reduced number of consecutive uracils with respect to the corresponding wild-type nucleic acid sequence. For example, two consecutive leucines can be encoded by the sequence CUUUUG, which includes a four uracil cluster. Such a subsequence can be substituted, e.g., with CUGCUC, which removes the uracil cluster.

[0313] Phenylalanine can be encoded by UUC or UUU. Thus, even if phenylalanines encoded by UUU are replaced by UUC, the synonymous codon still contains a uracil pair (UU). Accordingly, the number of phenylalanines in a sequence establishes a minimum number of uracil pairs (UU) that cannot be eliminated without altering the number of phenylalanines in the encoded polypeptide. For example, if the polypeptide, e.g., wild type MCM, has 27, 28, 29, or 30 phenylalanines, the absolute minimum number of uracil pairs (UU) in that uracil-modified sequence encoding the polypeptide, e.g., wild type MCM, can contain is 27, 28, 29, or 30, respectively.

[0314] Wild type MCM contains 82 uracil pairs (UU), and 29 uracil triplets (UUU). In some embodiments, a uracil-modified sequence encoding an MCM polypeptide of the disclosure has a reduced number of uracil triplets (UUU) with respect to the wild-type nucleic acid sequence. In some embodiments, a uracil-modified sequence encoding an MCM polypeptide of the disclosure contains 28, 27, 26, 25, 24, 23, 22, 21, 20, 19, 18, 17, 16, 15, 14, 13, 12, 11, 10, 9, 8, 7, 6, 5, 4, 3, 2, 1 or no uracil triplets (UUU).

[0315] In some embodiments, a uracil-modified sequence encoding an MCM polypeptide has a reduced number of uracil pairs (UU) with respect to the number of uracil pairs (UU) in the wild-type nucleic acid sequence. In some embodiments, a uracil-modified sequence encoding an MCM polypeptide of the disclosure has a number of uracil pairs (UU) corresponding to the minimum possible number of uracil pairs (UU) in the wild-type nucleic acid sequence, e.g., 28 uracil pairs in the case of wild type MCM.

[0316] In some embodiments, a uracil-modified sequence encoding an MCM polypeptide of the disclosure has at least 1, 2, 3, 4, 5, 6, 7, 8, 9, 10, 11, 12, 13, 14, 15, 16, 17, 18, 19, 20, 21, 22, 23, 24, 25, 26, 27, 28, 29, 30, 31, 32, 33, 34, 35, 36, 37, 38, 39, 40, 41, 42, 43, 44, 45, 46, 47, 48, 49, 50, 51, 52, 53, or 54 uracil pairs (UU) less than the number of uracil pairs (UU) in the wild-type nucleic acid sequence. In some embodiments, a uracil-modified sequence encoding an MCM polypeptide of the disclosure has between 20 and 35 uracil pairs (UU).

[0317] The phrase “uracil pairs (UU) relative to the uracil pairs (UU) in the wild type nucleic acid sequence,” refers to a parameter determined by dividing the number of uracil pairs (UU) in a sequence-optimized nucleotide sequence by the total number of uracil pairs (UU) in the corresponding wild-type nucleotide sequence and multiplying by 100. This parameter is abbreviated herein as % UU_{wt}.

[0318] In some embodiments, a uracil-modified sequence encoding an MCM polypeptide of the disclosure has a % UU_{wt} less than 90%, less than 85%, less than 80%, less than 75%, less than 70%, less than 65%, less than 60%, less than 65%, less than 60%, less than 55%, less than 50%, less than 40%, less than 30%, or less than 20%.

[0319] In some embodiments, a uracil-modified sequence encoding an MCM polypeptide has a % UU_{wt} between 20% and 50%. In a particular embodiment, a uracil-modified sequence encoding an MCM polypeptide of the disclosure has a % UU_{wt} between 24% and 43%.

[0320] In some embodiments, the polynucleotide of the disclosure comprises a uracil-modified sequence encoding an MCM polypeptide disclosed herein. In some embodiments, the uracil-modified sequence encoding an MCM polypeptide comprises at least one chemically modified nucleobase, e.g., 5-methoxyuracil. In some embodiments, at least 95% of a nucleobase (e.g., uracil) in a uracil-modified sequence encoding an MCM polypeptide of the disclosure are modified nucleobases. In some embodiments, at least 95% of uracil in a uracil-modified sequence encoding an MCM polypeptide is 5-methoxyuracil.

[0321] In some embodiments, the “guanine content of the sequence optimized ORF encoding MCM with respect to the theoretical maximum guanine content of a nucleotide sequence encoding the MCM polypeptide,” abbreviated as % G_{TMX} is at least 69%, at least 70%, at least 75%, at least about 80%, at least about 85%, at least about 90%, at least about 95%, or about 100%. In some embodiments, the % G_{TMX} is between about 70% and about 80%, between about 71% and about 79%, between about 71% and about 78%, between about 71% and about 77% or between about 71% and about 76%.

[0322] In some embodiments, the “cytosine content of the ORF relative to the theoretical maximum cytosine content of a nucleotide sequence encoding the MCM polypeptide,” abbreviated as % C_{TMX}, is at least about 68%, at least about 70%, at least about 75%, at least about 80%, at least about 85%, at least about 90%, at least about 95%, or about 100%. In some embodiments, the % C_{TMX} is between about 68% and about 77%, between about 69% and about 76%, or between about 70% and about 75%.

[0323] In some embodiments, the “guanine and cytosine content (G/C) of the ORF relative to the theoretical maximum G/C content in a nucleotide sequence encoding the MCM polypeptide,” abbreviated as % G/C_{TMX} is at least about 85%, at least about 90%, at least about 95%, or about 100%. The % G/C_{TMX} is between about 85% and about 100%, between about 89% and about 96%, between about 90% and about 95%, or between about 91% and about 94%.

[0324] In some embodiments, the “G/C content in the ORF relative to the G/C content in the corresponding wild-type ORF,” abbreviated as % G/C_{WT} is at least 120%, at least 130%, at least 140%, at least 141%, at least 142%, at least 143%, at least 144%, at least 145%, at least 146%, at least 147%, at least 150%, or at least 155%.

[0325] In some embodiments, the average G/C content in the 3rd codon position in the ORF is at least 50%, at least 51%, at least 52%, at least 53%, at least 54%, at least 55%, at least 56%, at least 57%, at least 58%, at least 59%, or at least 60% higher than the average G/C content in the 3rd codon position in the corresponding wild-type ORF.

[0326] In some embodiments, the polynucleotide of the disclosure comprises an open reading frame (ORF) encoding an MCM polypeptide, wherein the ORF has been sequence optimized, and wherein each of % U_{TL}, % U_{WT}, % U_{TM}, % G_{TL}, % G_{WT}, % G_{TMX}, % C_{TL}, % C_{WT}, % C_{TMX}, % G/C_{TL}, % G/C_{WT}, or % G/C_{TMX}, alone or in a combination thereof is in a range between (i) a maximum corresponding to the parameter's maximum value (MAX) plus about 0.5, 1, 1.5, 2, 2.5, 3, 3.5, 4, 4.5, 5, 5.5, 6, 6.5, 7, 7.5, 8, 8.5, 9, 9.5, or 10 standard deviations (STD DEV), and (ii) a minimum corresponding to the parameter's minimum value (MIN) less 0.5, 1, 1.5, 2, 2.5, 3, 3.5, 4, 4.5, 5, 5.5, 6, 6.5, 7, 7.5, 8, 8.5, 9, 9.5, or 10 standard deviations (STD DEV).

[0327] Features, which can be considered beneficial in some embodiments of the present disclosure, can be encoded by regions of the polynucleotide and such regions can be upstream (5′) or downstream (3′) to, or within, a region that encodes a polypeptide. These regions can be incorporated into the polynucleotide before and/or after sequence optimization of the protein encoding region or open reading frame (ORF). It is not required that a polynucleotide contain both a 5′ and 3′ flanking region. Examples of such features include, but are not limited to, untranslated regions (UTRs), Kozak sequences, an oligo(dT) sequence, and detectable tags and can include multiple cloning sites that can have XbaI recognition.

[0328] In some embodiments, a 5′ UTR and/or a 3′ UTR region can be provided as flanking regions. Multiple 5′ or 3′ UTRs can be included in the flanking regions and can be the same or of different sequences. Any portion of the flanking regions, including none, can be sequence-optimized and any can independently contain one or more different structural or chemical modifications, before and/or after sequence optimization.

[0329] In some embodiments, the polynucleotide of the disclosure comprises, consists essentially or, or consists of the sequence set forth as SEQ ID NO: 769, wherein thymidine is changed to uridine. In other embodiments, the polynucleotide of the disclosure comprises, consists essentially or, or consists of the sequence set forth as SEQ ID NO: 770, wherein thymidine is changed to uridine. In other embodiments, the polynucleotide does not comprise a polyC.

[0330] After optimization (if desired), the polynucleotides components are reconstituted and transformed into a vector such as, but not limited to, plasmids, viruses, cosmids, and artificial chromosomes. For example, the optimized polynucleotide can be reconstituted and transformed into chemically competent E. coli, yeast, neurospora, maize, drosophila, etc. where high copy plasmid-like or chromosome structures occur by methods described herein.

[0331] Synthetic polynucleotides and their nucleic acid analogs play an important role in the research and studies of biochemical processes. Various enzyme-assisted and chemical-based methods have been developed to synthesize polynucleotides and nucleic acids.

[0332] Enzymatic methods include in vitro transcription that uses RNA polymerases to synthesize the polynucleotides of the present disclosure. Enzymatic methods and RNA polymerases for transcription are described in International Patent Application No. PCT/US2014/53907, the contents of which are herein incorporated by reference in its entirety.

[0333] Solid-phase chemical synthesis can be used to manufacture the polynucleotides described herein or portions thereof. Solid-phase chemical synthesis manufacturing of the polynucleotides described herein are described in International Patent Application No. PCT/US2014/53907, the contents of which are herein incorporated by reference in its entirety.

[0334] Liquid phase chemical synthesis can be used to manufacture the polynucleotides described herein or portions thereof. Liquid phase chemical synthesis manufacturing of the polynucleotides described herein are described in International Patent Application No. PCT/US2014/53907, the contents of which are herein incorporated by reference in its entirety.

[0335] Combinations of different synthetic methods can be used to manufacture the polynucleotides described herein or portions thereof. These combinations are described in International Patent Application No. PCT/US2014/53907, the contents of which are herein incorporated by reference in its entirety.

[0336] Small region synthesis can be used for regions or subregions of the polynucleotides of the present disclosure. These synthesis methods are described in International Patent Application No. PCT/US2014/53907, the contents of which are herein incorporated by reference in its entirety.

[0337] Ligation of polynucleotide regions or subregions can be used to prepare the polynucleotides described herein. These ligation methods are described in International Patent Application No. PCT/US2014/53907, the contents of which are herein incorporated by reference in its entirety.

### Polypeptides Encoded by the Polynucleotides of the Disclosure

[0338] In some embodiments, the MCM polypeptides encoded by polynucleotides of the disclosure peptide are functional MCM. As used herein, the term “MCM” protein is used interchangeably with “MUT” protein. Therefore, human MCM protein can be written as human MUT or hMUT, and murine MCM protein can be written as murine MUT or mMUT. In some embodiments, the MCM polypeptides encoded by polynucleotides of the disclosure peptide are variants, peptides or polypeptides containing substitutions, insertions and/or additions, deletions and covalent modifications with respect to an MCM peptide sequence. For example, sequence tags or amino acids, such as one or more lysines, can be added to the peptide sequences encoded by the polynucleotides of the disclosure (e.g., at the N-terminal or C-terminal ends). Sequence tags can be used for peptide purification or localization. Lysines can be used to increase peptide solubility or to allow for biotinylation. In some embodiments, amino acid residues located at the carboxy and amino terminal regions of a polypeptide encoded by the polynucleotides of the disclosure can optionally be deleted providing for truncated sequences.

[0339] In some embodiments, the polynucleotides described herein encode a substitutional variant of an MCM protein. The substitutional variant can comprise one, two, three or more than three substitutions. “Substitutional variants” when referring to polypeptides are those that have at least one amino acid residue in a native or starting sequence removed and a different amino acid inserted in its place at the same position. The substitutions can be single, where only one amino acid in the molecule has been substituted, or they can be multiple, where two or more amino acids have been substituted in the same molecule.

[0340] In some embodiments, the polynucleotides described herein encode a variant of an MCM protein with one or more conservative amino acids substitutions. As used herein the term “conservative amino acid substitution” refers to the substitution of an amino acid that is normally present in the sequence with a different amino acid of similar size, charge, or polarity. Examples of conservative substitutions include the substitution of a non-polar (hydrophobic) residue such as isoleucine, valine and leucine for another non-polar residue. Likewise, examples of conservative substitutions include the substitution of one polar (hydrophilic) residue for another such as between arginine and lysine, between glutamine and asparagine, and between glycine and serine. Additionally, the substitution of a basic residue such as lysine, arginine or histidine for another, or the substitution of one acidic residue such as aspartic acid or glutamic acid for another acidic residue are additional examples of conservative substitutions. Examples of non-conservative substitutions include the substitution of a non-polar (hydrophobic) amino acid residue such as isoleucine, valine, leucine, alanine, methionine for a polar (hydrophilic) residue such as cysteine, glutamine, glutamic acid or lysine and/or a polar residue for a non-polar residue.

[0341] In other embodiments, the polynucleotides encode an insertional MCM variant. “Insertional variants” when referring to polypeptides are those with one or more amino acids inserted immediately adjacent to an amino acid at a particular position in a native or starting sequence. “Immediately adjacent” to an amino acid means connected to either the alpha-carboxy or alpha-amino functional group of the amino acid.

[0342] In other embodiments, the polynucleotides of the disclosure encode a deletional MCM variant. “Deletional variants” when referring to polypeptides are those with one or more amino acids in the native or starting amino acid sequence removed. Ordinarily, deletional variants will have one or more amino acids deleted in a particular region of the molecule.

[0343] In some embodiments, the polynucleotides of the disclosure encode a covalent derivative. “Covalent derivatives” when referring to polypeptides include modifications of a native or starting protein with an organic proteinaceous or non-proteinaceous derivatizing agent, and/or post-translational modifications. Covalent modifications are traditionally introduced by reacting targeted amino acid residues of the protein with an organic derivatizing agent that is capable of reacting with selected side-chains or terminal residues, or by harnessing mechanisms of post-translational modifications that function in selected recombinant host cells. The resultant covalent derivatives are useful in programs directed at identifying residues important for biological activity, for immunoassays, or for the preparation of anti-protein antibodies for immunoaffinity purification of the recombinant glycoprotein. Such modifications are within the ordinary skill in the art and are performed without undue experimentation.

[0344] Certain post-translational modifications are the result of the action of recombinant host cells on the expressed polypeptide. Glutaminyl and asparaginyl residues are frequently post-translationally deamidated to the corresponding glutamyl and aspartyl residues. Alternatively, these residues are deamidated under mildly acidic conditions. Either form of these residues can be present in the polypeptides produced in accordance with the present disclosure.

[0345] Other post-translational modifications include hydroxylation of proline and lysine, phosphorylation of hydroxyl groups of seryl or threonyl residues, methylation of the alpha-amino groups of lysine, arginine, and histidine side chains (T. E. Creighton, Proteins: Structure and Molecular Properties, W.H. Freeman & Co., San Francisco, pp. 79-86 (1983)).

[0346] “Features,” when referring to polypeptides, are defined as distinct amino acid sequence-based components of a molecule. Features of the polypeptides encoded by the polynucleotides of the present disclosure include surface manifestations, local conformational shape, folds, loops, half-loops, domains, half-domains, sites, termini or any combination thereof.

[0347] As used herein, when referring to polypeptides, the term “domain” refers to a motif of a polypeptide having one or more identifiable structural or functional characteristics or properties (e.g., binding capacity, serving as a site for protein-protein interactions).

[0348] As used herein, when referring to polypeptides, the terms “site” as it pertains to amino acid based embodiments is used synonymously with “amino acid residue” and “amino acid side chain.” A site represents a position within a peptide or polypeptide that can be modified, manipulated, altered, derivatized or varied within the polypeptide based molecules of the present disclosure.

[0349] As used herein the terms “termini” or “terminus,” when referring to polypeptides, refers to an extremity of a peptide or polypeptide. Such extremity is not limited only to the first or final site of the peptide or polypeptide but can include additional amino acids in the terminal regions. The polypeptide based molecules of the present disclosure can be characterized as having both an N-terminus (terminated by an amino acid with a free amino group (NH2)) and a C-terminus (terminated by an amino acid with a free carboxyl group (COOH)). Proteins of the disclosure are in some cases made up of multiple polypeptide chains brought together by disulfide bonds or by non-covalent forces (multimers, oligomers). These sorts of proteins will have multiple N- and C-termini. Alternatively, the termini of the polypeptides can be modified such that they begin or end, as the case can be, with a non-polypeptide based moiety such as an organic conjugate.

[0350] Once any of the features have been identified or defined as a desired component of a polypeptide to be encoded by the polynucleotide of the disclosure, any of several manipulations and/or modifications of these features can be performed by moving, swapping, inverting, deleting, randomizing or duplicating. Furthermore, it is understood that manipulation of features can result in the same outcome as a modification to the molecules of the disclosure. For example, a manipulation that involved deleting a domain would result in the alteration of the length of a molecule just as modification of a nucleic acid to encode less than a full length molecule would.

[0351] Modifications and manipulations can be accomplished by methods known in the art such as, but not limited to, site directed mutagenesis or a priori incorporation during chemical synthesis. The resulting modified molecules can then be tested for activity using in vitro or in vivo assays such as those described herein or any other suitable screening assay known in the art.

[0352] According to the present disclosure, the polypeptides can comprise a consensus sequence that is discovered through rounds of experimentation. As used herein a “consensus” sequence is a single sequence that represents a collective population of sequences allowing for variability at one or more sites.

[0353] As recognized by those skilled in the art, protein fragments, functional protein domains, and homologous proteins are also considered to be within the scope of polypeptides of interest of this disclosure. For example, provided herein is any protein fragment (meaning a polypeptide sequence at least one amino acid residue shorter than a reference polypeptide sequence but otherwise identical) of a reference protein 10, 20, 30, 40, 50, 60, 70, 80, 90, 100 or greater than 100 amino acids in length. In another example, any protein that includes a stretch of about 20, about 30, about 40, about 50, or about 100 amino acids that are about 40%, about 50%, about 60%, about 70%, about 80%, about 90%, about 95%, or about 100% identical to any of the sequences described herein can be utilized in accordance with the disclosure.

[0354] In certain embodiments, a polypeptide encoded by the polynucleotide of the disclosure includes 2, 3, 4, 5, 6, 7, 8, 9, 10, or more mutations as shown in any of the sequences provided or referenced herein.

[0355] In some embodiments, the encoded polypeptide variant has the same or a similar activity as the reference polypeptide. Alternatively, the variant has an altered activity (e.g., increased or decreased) relative to a reference polypeptide. Generally, variants of a particular polynucleotide or polypeptide of the disclosure will have at least about 40%, 45%, 50%, 55%, 60%, 65%, 70%, 75%, 80%, 85%, 90%, 91%, 92%, 93%, 94%, 95%, 96%, 97%, 98%, 99% but less than 100% sequence identity to that particular reference polynucleotide or polypeptide as determined by sequence alignment programs and parameters described herein and known to those skilled in the art. Such tools for alignment include those of the BLAST suite (Stephen F. Altschul, Thomas L. Madden, Alejandro A. Schaffer, Jinghui Zhang, Zheng Zhang, Webb Miller, and David J. Lipman (1997), “Gapped BLAST and PSI-BLAST: a new generation of protein database search programs,” Nucleic Acids Res. 25:3389-3402.) Other tools are described herein, specifically in the definition of “Identity.”

[0356] Default parameters in the BLAST algorithm include, for example, an expect threshold of 10, Word size of 28, Match/Mismatch Scores 1, -2, Gap costs Linear. Any filter can be applied as well as a selection for species specific repeats, e.g., Homo sapiens.

[0357] According to the present disclosure, the protein is encoded by a polynucleotide that can comprise at least a first region of linked nucleosides encoding at least one polypeptide of interest. Some polypeptides encoded by the polynucleotides of interest of the present disclosure are listed in Table 3 below. In particular, Table 3 shows human MCM wild type and mutant amino acid sequences.

TABLE 3
MCM Polypeptides and Polynucleotides

| SEQ ID | | |
|---|---|---|
| No | Gene | Sequence |
| SEQ ID | Functional | MLRAKNQLFLLSPHYLRQVKESSGSRLIQQRLLHQQQPLHPEWAALAKKQLKGKNPED |
| NO: 208 | Human | LIWHTPEGISIKPLYSKRDTMDLPEELPGVKPFTRGPYPTMYTFRPWTIRQYAGFSTV |
| | MCM | EESNKFYKDNIKAGQQGLSVAFDLATHRGYDSDNPRVRGDVGMAGVAIDTVEDTKILF |
| | | DGIPLEKMSVSMTMNGAVIPVLANFIVTGEEQGVPKEKLTGTIQNDILKEFMVRNTYI |
| | | FPPEPSMKIIADIFEYTAKHMPKFNSISISGYHMQEAGADAILELAYTLADGLEYSRT |
| | | GLQAGLTIDEFAPRLSFFWGIGMNFYMEIAKMRAGRRLWAHLIEKMFQPKNSKSLLLR |
| | | AHCQTSGWSLTEQDPYNNIVRTAIEAMAAVFGGTQSLHTNSFDEALGLPTVKSARIAR |
| | | NTQIIIQEESGIPKVADPWGGSYMMECLTNDVYDAALKLINEIEEMGGMAKAVAEGIP |
| | | KLRIEECAARRQARIDSGSEVIVGVNKYQLEKEDAVEVLAIDNTSVRNRQIEKLKKIK |
| | | SSRDQALAERCLAALTECAASGDGNILALAVDASRARCTVGEITDALKKVFGEHKAND |
| | | RMVSGAYRQEFGESKEITSAIKRVHKFMEREGRRPRLLVAKMGQDGHDRGAKVIATGF |
| | | ADLGFDVDIGPLFQTPREVAQQAVDADVHAVGISTLAAGHKTLVPELIKELNSLGRPD |
| | | ILVMCGGVIPPQDYEFLFEVGVSNVFGPGTRIPKAAVQVLDDIEKCLEKKQQSV |
| a.a. 33 to | Mature | LHQQQPLHPEWAALAKKQLKGKNPEDLIWHTPEGISIKPLYSKRDTMDLPEELPGVKP |
| 750 of | human | FTRGPYPTMYTFRPWTIRQYAGFSTVEESNKFYKDNIKAGQQGLSVAFDLATHRGYDS |
| SEQ ID | MCM | DNPRVRGDVGMAGVAIDTVEDTKILFDGIPLEKMSVSMTMNGAVIPVLANFIVTGEEQ |
| NO: 208 | | GVPKEKLTGTIQNDILKEFMVRNTYIFPPEPSMKIIADIFEYTAKHMPKFNSISISGY |
| | | HMQEAGADAILELAYTLADGLEYSRTGLQAGLTIDEFAPRLSFFWGIGMNFYMEIAKM |
| | | RAGRRLWAHLIEKMFQPKNSKSLLLRAHCQTSGWSLTEQDPYNNIVRTAIEAMAAVFG |
| | | GTQSLHTNSFDEALGLPTVKSARIARNTQIIIQEESGIPKVADPWGGSYMMECLTNDV |
| | | YDAALKLINEIEEMGGMAKAVAEGIPKLRIEECAARRQARIDSGSEVIVGVNKYQLEK |
| | | EDAVEVLAIDNTSVRNRQIEKLKKIKSSRDQALAERCLAALTECAASGDGNILALAVD |
| | | ASRARCTVGEITDALKKVFGEHKANDRMVSGAYRQEFGESKEITSAIKRVHKFMEREG |
| | | RRPRLLVAKMGQDGHDRGAKVIATGFADLGFDVDIGPLFQTPREVAQQAVDADVHAVG |
| | | VSTLAAGHKTLVPELIKELNSLGRPDILVMCGGVIPPQDYEFLFEVGVSNVFGPGTRI |
| | | PKAAVQVLDDIEKCLEKKQQSV |
| SEQ ID | Functional | MLRAKNQLFLLSPHYLRQVKESSGSRLIQQRLLHQQQPLHPEWAALAKKQLKGKNPED |
| NO: 209 | Human | LIWHTPEGISVKPLYSKRDTMDLPEELPGVKPFTRGPYPTMYTFRPWTIRQYAGFSTV |
| | MCM | EESNKFYKDNIKAGQQGLSVAFDLATHRGYDSDNPRVRGDVGMAGVAIDTVEDTKILF |
| | I69V | DGIPLEKMSVSMTMNGAVIPVLANFIVTGEEQGVPKEKLTGTIQNDILKEFMVRNTYI |
| | | FPPEPSMKIIADIFEYTAKHMPKFNSISISGYHMQEAGADAILELAYTLADGLEYSRT |
| | | GLQAGLTIDEFAPRLSFFWGIGMNFYMEIAKMRAGRRLWAHLIEKMFQPKNSKSLLLR |
| | | AHCQTSGWSLTEQDPYNNIVRTAIEAMAAVFGGTQSLHTNSFDEALGLPTVKSARIAR |
| | | NTQIIIQEESGIPKVADPWGGSYMMECLTNDVYDAALKLINEIEEMGGMAKAVAEGIP |
| | | KLRIEECAARRQARIDSGSEVIVGVNKYQLEKEDAVEVLAIDNTSVRNRQIEKLKKIK |
| | | SSRDQALAERCLAALTECAASGDGNILALAVDASRARCTVGEITDALKKVFGEHKAND |
| | | RMVSGAYRQEFGESKEITSAIKRVHKFMEREGRRPRLLVAKMGQDGHDRGAKVIATGF |
| | | ADLGFDVDIGPLFQTPREVAQQAVDADVHAVGISTLAAGHKTLVPELIKELNSLGRPD |
| | | ILVMCGGVIPPQDYEFLFEVGVSNVFGPGTRIPKAAVQVLDDIEKCLEKKQQSV |
| SEQ ID | Functional | MLRAKNQLFLLSPHYLRQVKESSGSRLIQQRLLHQQQPLHPEWAALAKKQLKGKNPED |
| NO: 210 | Human | LIWHTPEGISIKPLYSKRDTMDLPEELPGVKPFTRGPYPTMYTFRPWTIRQYAGFSTV |
| | MCM | EESNKFYKDNIKAGQQGLSVAFDLATHRGYDSDNPRVRGDVGMAGVAIDTVEDTKILF |
| | A499T | DGIPLEKMSVSMTMNGAVIPVLANFIVTGEEQGVPKEKLTGTIQNDILKEFMVRNTYI |
| | | FPPEPSMKIIADIFEYTAKHMPKFNSISISGYHMQEAGADAILELAYTLADGLEYSRT |
| | | GLQAGLTIDEFAPRLSFFWGIGMNFYMEIAKMRAGRRLWAHLIEKMFQPKNSKSLLLR |
| | | AHCQTSGWSLTEQDPYNNIVRTAIEAMAAVFGGTQSLHTNSFDEALGLPTVKSARIAR |
| | | NTQIIIQEESGIPKVADPWGGSYMMECLTNDVYDAALKLINEIEEMGGMAKAVAEGIP |
| | | KLRIEECAARRQARIDSGSEVIVGVNKYQLEKEDTVEVLAIDNTSVRNRQIEKLKKIK |
| | | SSRDQALAERCLAALTECAASGDGNILALAVDASRARCTVGEITDALKKVFGEHKAND |
| | | RMVSGAYRQEFGESKEITSAIKRVHKFMEREGRRPRLLVAKMGQDGHDRGAKVIATGF |
| | | ADLGFDVDIGPLFQTPREVAQQAVDADVHAVGISTLAAGHKTLVPELIKELNSLGRPD |
| | | ILVMCGGVIPPQDYEFLFEVGVSNVFGPGTRIPKAAVQVLDDIEKCLEKKQQSV |
| SEQ ID | Functional | MLRAKNQLFLLSPHYLRQVKESSGSRLIQQRLLHQQQPLHPEWAALAKKQLKGKNPED |
| NO: 211 | Human | LIWHTPEGISIKPLYSKRDTMDLPEELPGVKPFTRGPYPTMYTFRPWTIRQYAGFSTV |
| | MCM | EESNKFYKDNIKAGQQGLSVAFDLATHRGYDSDNPRVRGDVGMAGVAIDTVEDTKILF |
| | R532H | DGIPLEKMSVSMTMNGAVIPVLANFIVTGEEQGVPKEKLTGTIQNDILKEFMVRNTYI |
| | | FPPEPSMKIIADIFEYTAKHMPKFNSISISGYHMQEAGADAILELAYTLADGLEYSRT |
| | | GLQAGLTIDEFAPRLSFFWGIGMNFYMEIAKMRAGRRLWAHLIEKMFQPKNSKSLLLR |
| | | AHCQTSGWSLTEQDPYNNIVRTAIEAMAAVFGGTQSLHTNSFDEALGLPTVKSARIAR |
| | | NTQIIIQEESGIPKVADPWGGSYMMECLTNDVYDAALKLINEIEEMGGMAKAVAEGIP |
| | | KLRIEECAARRQARIDSGSEVIVGVNKYQLEKEDAVEVLAIDNTSVRNRQIEKLKKIK |
| | | SSRDQALAEHCLAALTECAASGDGNILALAVDASRARCTVGEITDALKKVFGEHKAND |
| | | RMVSGAYRQEFGESKEITSAIKRVHKFMEREGRRPRLLVAKMGQDGHDRGAKVIATGF |
| | | ADLGFDVDIGPLFQTPREVAQQAVDADVHAVGISTLAAGHKTLVPELIKELNSLGRPD |
| | | ILVMCGGVIPPQDYEFLFEVGVSNVFGPGTRIPKAAVQVLDDIEKCLEKKQQSV |
| SEQ ID | Functional | MLRAKNQLFLLSPHYLRQVKESSGSRLIQQRLLHQQQPLHPEWAALAKKQLKGKNPED |
| NO: 212 | Human | LIWHTPEGISIKPLYSKRDTMDLPEELPGVKPFTRGPYPTMYTFRPWTIRQYAGFSTV |
| | MCM | EESNKFYKDNIKAGQQGLSVAFDLATHRGYDSDNPRVRGDVGMAGVAIDTVEDTKILF |
| | T598A | DGIPLEKMSVSMTMNGAVIPVLANFIVTGEEQGVPKEKLTGTIQNDILKEFMVRNTYI |
| | | FPPEPSMKIIADIFEYTAKHMPKFNSISISGYHMQEAGADAILELAYTLADGLEYSRT |
| | | GLQAGLTIDEFAPRLSFFWGIGMNFYMEIAKMRAGRRLWAHLIEKMFQPKNSKSLLLR |
| | | AHCQTSGWSLTEQDPYNNIVRTAIEAMAAVFGGTQSLHTNSFDEALGLPTVKSARIAR |
| | | NTQIIIQEESGIPKVADPWGGSYMMECLTNDVYDAALKLINEIEEMGGMAKAVAEGIP |
| | | KLRIEECAARRQARIDSGSEVIVGVNKYQLEKEDAVEVLAIDNTSVRNRQIEKLKKIK |
| | | SSRDQALAERCLAALTECAASGDGNILALAVDASRARCTVGEITDALKKVFGEHKAND |
| | | RMVSGAYRQEFGESKEIASAIKRVHKFMEREGRRPRLLVAKMGQDGHDRGAKVIATGF |
| | | ADLGFDVDIGPLFQTPREVAQQAVDADVHAVGISTLAAGHKTLVPELIKELNSLGRPD |
| | | ILVMCGGVIPPQDYEFLFEVGVSNVFGPGTRIPKAAVQVLDDIEKCLEKKQQSV |
| SEQ ID | Functional | MLRAKNQLFLLSPHYLRQVKESSGSRLIQQRLLHQQQPLHPEWAALAKKQLKGKNPED |
| NO: 213 | Human | LIWHTPEGISIKPLYSKRDTMDLPEELPGVKPFTRGPYPTMYTFRPWTIRQYAGFSTV |
| | MCM | EESNKFYKDNIKAGQQGLSVAFDLATHRGYDSDNPRVRGDVGMAGVAIDTVEDTKILF |
| | I671V | DGIPLEKMSVSMTMNGAVIPVLANFIVTGEEQGVPKEKLTGTIQNDILKEFMVRNTYI |
| | | FPPEPSMKIIADIFEYTAKHMPKFNSISISGYHMQEAGADAILELAYTLADGLEYSRT |
| | | GLQAGLTIDEFAPRLSFFWGIGMNFYMEIAKMRAGRRLWAHLIEKMFQPKNSKSLLLR |
| | | AHCQTSGWSLTEQDPYNNIVRTAIEAMAAVFGGTQSLHTNSFDEALGLPTVKSARIAR |
| | | NTQIIIQEESGIPKVADPWGGSYMMECLTNDVYDAALKLINEIEEMGGMAKAVAEGIP |
| | | KLRIEECAARRQARIDSGSEVIVGVNKYQLEKEDAVEVLAIDNTSVRNRQIEKLKKIK |
| | | SSRDQALAERCLAALTECAASGDGNILALAVDASRARCTVGEITDALKKVFGEHKAND |
| | | RMVSGAYRQEFGESKEITSAIKRVHKFMEREGRRPRLLVAKMGQDGHDRGAKVIATGF |
| | | ADLGFDVDIGPLFQTPREVAQQAVDADVHAVGVSTLAAGHKTLVPELIKELNSLGRPD |
| | | ILVMCGGVIPPQDYEFLFEVGVSNVFGPGTRIPKAAVQVLDDIEKCLEKKQQSV |

### II. Modified Polynucleotides

[0358] The disclosure also includes a modified polynucleotide comprising the polynucleotide described herein, i.e., a polynucleotide comprising an ORF encoding an MCM polypeptide that contains polynucleotides that are chemically and/or structurally modified. When the polynucleotides of the present disclosure are chemically and/or structurally modified the polynucleotides can be referred to as “modified polynucleotides.”

[0359] The present disclosure provides for modified nucleosides and nucleotides of a polynucleotide (e.g., RNA polynucleotides, such as mRNA polynucleotides). A “nucleoside” refers to a compound containing a sugar molecule (e.g., a pentose or ribose) or a derivative thereof in combination with an organic base (e.g., a purine or pyrimidine) or a derivative thereof (also referred to herein as “nucleobase”). A nucleotide” refers to a nucleoside, including a phosphate group. Modified nucleotides can by synthesized by any useful method, such as, for example, chemically, enzymatically, or recombinantly, to include one or more modified or non-natural nucleosides. Polynucleotides can comprise a region or regions of linked nucleosides. Such regions can have variable backbone linkages. The linkages can be standard phosphodioester linkages, in which case the polynucleotides would comprise regions of nucleotides.

[0360] The modifications can be various distinct modifications. In some embodiments, the regions can contain one, two, or more (optionally different) nucleoside or nucleotide modifications. In some embodiments, a modified polynucleotide, introduced to a cell can exhibit reduced degradation in the cell, as compared to an unmodified polynucleotide.

### Structural Modifications

[0361] In some embodiments, the polynucleotides of the present disclosure are structurally modified. As used herein, a “structural” modification is one in which two or more linked nucleosides are inserted, deleted, duplicated, inverted or randomized in a polynucleotide without significant chemical modification to the nucleotides themselves. Because chemical bonds will necessarily be broken and reformed to effect a structural modification, structural modifications are of a chemical nature and hence are chemical modifications. However, structural modifications will result in a different sequence of nucleotides. For example, the polynucleotide “ATCG” can be chemically modified to “AT-5meC-G”. The same polynucleotide can be structurally modified from “ATCG” to “ATCCCG”. Here, the dinucleotide “CC” has been inserted, resulting in a structural modification to the polynucleotide.

### Chemical Modifications

[0362] In some embodiments, the polynucleotides of the present disclosure are chemically modified. As used herein in reference to a polynucleotide, the terms “chemical modification” or, as appropriate, “chemically modified” refer to modification with respect to adenosine (A), guanosine (G), uridine (U), thymidine (T) or cytidine (C) ribo- or deoxyribonucleosides in one or more of their position, pattern, percent or population. Generally, herein, these terms are not intended to refer to the ribonucleotide modifications in naturally occurring 5′-terminal mRNA cap moieties.

[0363] In some embodiments, the polynucleotides of the present disclosure can have a uniform chemical modification of all or any of the same nucleoside type or a population of modifications produced by mere downward titration of the same starting modification in all or any of the same nucleoside type, or a measured percent of a chemical modification of all any of the same nucleoside type but with random incorporation, such as where all uridines are replaced by a uridine analog, e.g., pseudouridine or 5-methoxyuridine. In another embodiment, the polynucleotides can have a uniform chemical modification of two, three, or four of the same nucleoside type throughout the entire polynucleotide (such as all uridines and all cytosines, etc. are modified in the same way).

[0364] Modified nucleotide base pairing encompasses not only the standard adenosine-thymine, adenosine-uracil, or guanosine-cytosine base pairs, but also base pairs formed between nucleotides and/or modified nucleotides comprising non-standard or modified bases, wherein the arrangement of hydrogen bond donors and hydrogen bond acceptors permits hydrogen bonding between a non-standard base and a standard base or between two complementary non-standard base structures. One example of such non-standard base pairing is the base pairing between the modified nucleotide inosine and adenine, cytosine or uracil. Any combination of base/sugar or linker can be incorporated into polynucleotides of the present disclosure.

[0365] The skilled artisan will appreciate that, except where otherwise noted, polynucleotide sequences set forth in the instant application will recite “T”s in a representative DNA sequence but where the sequence represents RNA, the “T”s would be substituted for “U”s.

[0366] Modifications of polynucleotides (e.g., RNA polynucleotides, such as mRNA polynucleotides) that are useful in the compositions, methods and synthetic processes of the present disclosure include, but are not limited to the following nucleotides, nucleosides, and nucleobases: 2-methylthio-N6-(cis-hydroxyisopentenyl)adenosine; 2-methylthio-N6-methyladenosine; 2-methylthio-N6-threonyl carbamoyladenosine; N6-glycinylcarbamoyladenosine; N6-isopentenyladenosine; N6-methyladenosine; N6-threonylcarbamoyladenosine; 1,2′-O-dimethyladenosine; 1-methyladenosine; 2′-O-methyladenosine; 2′-O-ribosyladenosine (phosphate); 2-methyladenosine; 2-methylthio-N6 isopentenyladenosine; 2-methylthio-N6-hydroxynorvalyl carbamoyladenosine; 2′-O-methyladenosine; 2′-O-ribosyladenosine (phosphate); Isopentenyladenosine; N6-(cis-hydroxyisopentenyl)adenosine; N6,2′-O-dimethyladenosine; N6,2′-O-dimethyladenosine; N6,N6,2′-O-trimethyladenosine; N6,N6-dimethyladenosine; N6-acetyladenosine; N6-hydroxynorvalylcarbamoyladenosine; N6-methyl-N6-threonylcarbamoyladenosine; 2-methyladenosine; 2-methylthio-N6-isopentenyladenosine; 7-deaza-adenosine; N1-methyl-adenosine; N6, N6 (dimethyl)adenine; N6-cis-hydroxy-isopentenyl-adenosine; α-thio-adenosine; 2 (amino)adenine; 2 (aminopropyl)adenine; 2 (methylthio) N6 (isopentenyl)adenine; 2-(alkyl)adenine; 2-(aminoalkyl)adenine; 2-(aminopropyl)adenine; 2-(halo)adenine; 2-(halo)adenine; 2-(propyl)adenine; 2′-Amino-2′-deoxy-ATP; 2′-Azido-2′-deoxy-ATP; 2′-Deoxy-2′-a-aminoadenosine TP; 2′-Deoxy-2′-a-azidoadenosine TP; 6 (alkyl)adenine; 6 (methyl)adenine; 6-(alkyl)adenine; 6-(methyl)adenine; 7 (deaza)adenine; 8 (alkenyl)adenine; 8 (alkynyl)adenine; 8 (amino)adenine; 8 (thioalkyl)adenine; 8-(alkenyl)adenine; 8-(alkyl)adenine; 8-(alkynyl)adenine; 8-(amino)adenine; 8-(halo)adenine; 8-(hydroxyl)adenine; 8-(thioalkyl)adenine; 8-(thiol)adenine; 8-azido-adenosine; aza adenine; deaza adenine; N6 (methyl)adenine; N6-(isopentyl)adenine; 7-deaza-8-aza-adenosine; 7-methyladenine; 1-Deazaadenosine TP; 2′Fluoro-N6-Bz-deoxyadenosine TP; 2′-OMe-2-Amino-ATP; 2′O-methyl-N6-Bz-deoxyadenosine TP; 2′-a-Ethynyladenosine TP; 2-aminoadenine; 2-Aminoadenosine TP; 2-Amino-ATP; 2′-a-Trifluoromethyladenosine TP; 2-Azidoadenosine TP; 2′-b-Ethynyladenosine TP; 2-Bromoadenosine TP; 2′-b-Trifluoromethyladenosine TP; 2-Chloroadenosine TP; 2′-Deoxy-2′,2′-difluoroadenosine TP; 2′-Deoxy-2′-a-mercaptoadenosine TP; 2′-Deoxy-2′-a-thiomethoxyadenosine TP; 2′-Deoxy-2′-b-aminoadenosine TP; 2′-Deoxy-2′-b-azidoadenosine TP; 2′-Deoxy-2′-b-bromoadenosine TP; 2′-Deoxy-2′-b-chloroadenosine TP; 2′-Deoxy-2′-b-fluoroadenosine TP; 2′-Deoxy-2′-b-iodoadenosine TP; 2′-Deoxy-2′-b-mercaptoadenosine TP; 2′-Deoxy-2′-b-thiomethoxyadenosine TP; 2-Fluoroadenosine TP; 2-Iodoadenosine TP; 2-Mercaptoadenosine TP; 2-methoxy-adenine; 2-methylthio-adenine; 2-Trifluoromethyladenosine TP; 3-Deaza-3-bromoadenosine TP; 3-Deaza-3-chloroadenosine TP; 3-Deaza-3-fluoroadenosine TP; 3-Deaza-3-iodoadenosine TP; 3-Deazaadenosine TP; 4′-Azidoadenosine TP; 4′-Carbocyclic adenosine TP; 4′-Ethynyladenosine TP; 5′-Homo-adenosine TP; 8-Aza-ATP; 8-bromo-adenosine TP; 8-Trifluoromethyladenosine TP; 9-Deazaadenosine TP; 2-aminopurine; 7-deaza-2,6-diaminopurine; 7-deaza-8-aza-2,6-diaminopurine; 7-deaza-8-aza-2-aminopurine; 2,6-diaminopurine; 7-deaza-8-aza-adenine, 7-deaza-2-aminopurine; 2-thiocytidine; 3-methylcytidine; 5-formylcytidine; 5-hydroxymethylcytidine; 5-methylcytidine; N4-acetylcytidine; 2′-O-methylcytidine; 2′-O-methylcytidine; 5,2′-O-dimethylcytidine; 5-formyl-2′-O-methylcytidine; Lysidine; N4,2′-O-dimethylcytidine; N4-acetyl-2′-O-methylcytidine; N4-methylcytidine; N4,N4-Dimethyl-2′-OMe-Cytidine TP; 4-methylcytidine; 5-aza-cytidine; Pseudo-iso-cytidine; pyrrolo-cytidine; α-thio-cytidine; 2-(thio)cytosine; 2′-Amino-2′-deoxy-CTP; 2′-Azido-2′-deoxy-CTP; 2′-Deoxy-2′-a-aminocytidine TP; 2′-Deoxy-2′-a-azidocytidine TP; 3 (deaza) 5 (aza)cytosine; 3 (methyl)cytosine; 3-(alkyl)cytosine; 3-(deaza) 5 (aza)cytosine; 3-(methyl)cytidine; 4,2′-O-dimethylcytidine; 5 (halo)cytosine; 5 (methyl)cytosine; 5 (propynyl)cytosine; 5 (trifluoromethyl)cytosine; 5-(alkyl)cytosine; 5-(alkynyl)cytosine; 5-(halo)cytosine; 5-(propynyl)cytosine; 5-(trifluoromethyl)cytosine; 5-bromo-cytidine; 5-iodo-cytidine; 5-propynyl cytosine; 6-(azo)cytosine; 6-aza-cytidine; aza cytosine; deaza cytosine; N4 (acetyl)cytosine; 1-methyl-1-deaza-pseudoisocytidine; 1-methyl-pseudoisocytidine; 2-methoxy-5-methyl-cytidine; 2-methoxy-cytidine; 2-thio-5-methyl-cytidine; 4-methoxy-1-methyl-pseudoisocytidine; 4-methoxy-pseudoisocytidine; 4-thio-1-methyl-1-deaza-pseudoisocytidine; 4-thio-1-methyl-pseudoisocytidine; 4-thio-pseudoisocytidine; 5-aza-zebularine; 5-methyl-zebularine; pyrrolo-pseudoisocytidine; Zebularine; (E)-5-(2-Bromo-vinyl)cytidine TP; 2,2′-anhydro-cytidine TP hydrochloride; 2′Fluor-N4-Bz-cytidine TP; 2′Fluoro-N4-Acetyl-cytidine TP; 2′-O-Methyl-N4-Acetyl-cytidine TP; 2′O-methyl-N4-Bz-cytidine TP; 2′-a-Ethynylcytidine TP; 2′-a-Trifluoromethylcytidine TP; 2′-b-Ethynylcytidine TP; 2′-b-Trifluoromethylcytidine TP; 2′-Deoxy-2′,2′-difluorocytidine TP; 2′-Deoxy-2′-a-mercaptocytidine TP; 2′-Deoxy-2′-a-thiomethoxycytidine TP; 2′-Deoxy-2′-b-aminocytidine TP; 2′-Deoxy-2′-b-azidocytidine TP; 2′-Deoxy-2′-b-bromocytidine TP; 2′-Deoxy-2′-b-chlorocytidine TP; 2′-Deoxy-2′-b-fluorocytidine TP; 2′-Deoxy-2′-b-iodocytidine TP; 2′-Deoxy-2′-b-mercaptocytidine TP; 2′-Deoxy-2′-b-thiomethoxycytidine TP; 2′-O-Methyl-5-(1-propynyl)cytidine TP; 3′-Ethynylcytidine TP; 4′-Azidocytidine TP; 4′-Carbocyclic cytidine TP; 4′-Ethynylcytidine TP; 5-(1-Propynyl)ara-cytidine TP; 5-(2-Chloro-phenyl)-2-thiocytidine TP; 5-(4-Amino-phenyl)-2-thiocytidine TP; 5-Aminoallyl-CTP; 5-Cyanocytidine TP; 5-Ethynylara-cytidine TP; 5-Ethynylcytidine TP; 5′-Homo-cytidine TP; 5-Methoxycytidine TP; 5-Trifluoromethyl-Cytidine TP; N4-Amino-cytidine TP; N4-Benzoyl-cytidine TP; Pseudoisocytidine; 7-methylguanosine; N2,2′-O-dimethylguanosine; N2-methylguanosine; Wyosine; 1,2′-O-dimethylguanosine; 1-methylguanosine; 2′-O-methylguanosine; 2′-O-ribosylguanosine (phosphate); 2′-O-methylguanosine; 2′-O-ribosylguanosine (phosphate); 7-aminomethyl-7-deazaguanosine; 7-cyano-7-deazaguanosine; Archaeosine; Methylwyosine; N2,7-dimethylguanosine; N2,N2,2′-O-trimethylguanosine; N2,N2,7-trimethylguanosine; N2,N2-dimethylguanosine; N2,7,2′-O-trimethylguanosine; 6-thio-guanosine; 7-deaza-guanosine; 8-oxo-guanosine; N1-methyl-guanosine; α-thio-guanosine; 2 (propyl)guanine; 2-(alkyl)guanine; 2′-Amino-2′-deoxy-GTP; 2′-Azido-2′-deoxy-GTP; 2′-Deoxy-2′-a-aminoguanosine TP; 2′-Deoxy-2′-a-azidoguanosine TP; 6 (methyl)guanine; 6-(alkyl)guanine; 6-(methyl)guanine; 6-methyl-guanosine; 7 (alkyl)guanine; 7 (deaza)guanine; 7 (methyl)guanine; 7-(alkyl)guanine; 7-(deaza)guanine; 7-(methyl)guanine; 8 (alkyl)guanine; 8 (alkynyl)guanine; 8 (halo)guanine; 8 (thioalkyl)guanine; 8-(alkenyl)guanine; 8-(alkyl)guanine; 8-(alkynyl)guanine; 8-(amino)guanine; 8-(halo)guanine; 8-(hydroxyl)guanine; 8-(thioalkyl)guanine; 8-(thiol)guanine; aza guanine; deaza guanine; N (methyl)guanine; N-(methyl)guanine; 1-methyl-6-thio-guanosine; 6-methoxy-guanosine; 6-thio-7-deaza-8-aza-guanosine; 6-thio-7-deaza-guanosine; 6-thio-7-methyl-guanosine; 7-deaza-8-aza-guanosine; 7-methyl-8-oxo-guanosine; N2,N2-dimethyl-6-thio-guanosine; N2-methyl-6-thio-guanosine; 1-Me-GTP; 2′Fluoro-N2-isobutyl-guanosine TP; 2′O-methyl-N2-isobutyl-guanosine TP; 2′-a-Ethynylguanosine TP; 2′-a-Trifluoromethylguanosine TP; 2′-b-Ethynylguanosine TP; 2′-b-Trifluoromethylguanosine TP; 2′-Deoxy-2′,2′-difluoroguanosine TP; 2′-Deoxy-2′-a-mercaptoguanosine TP; 2′-Deoxy-2′-a-thiomethoxyguanosine TP; 2′-Deoxy-2′-b-aminoguanosine TP; 2′-Deoxy-2′-b-azidoguanosine TP; 2′-Deoxy-2′-b-bromoguanosine TP; 2′-Deoxy-2′-b-chloroguanosine TP; 2′-Deoxy-2′-b-fluoroguanosine TP; 2′-Deoxy-2′-b-iodoguanosine TP; 2′-Deoxy-2′-b-mercaptoguanosine TP; 2′-Deoxy-2′-b-thiomethoxyguanosine TP; 4′-Azidoguanosine TP; 4′-Carbocyclic guanosine TP; 4′-Ethynylguanosine TP; 5′-Homo-guanosine TP; 8-bromoguanosine TP; 9-Deazaguanosine TP; N2-isobutyl-guanosine TP; 1-methylinosine; Inosine; 1,2′-O-dimethylinosine; 2′-O-methylinosine; 7-methylinosine; 2′-O-methylinosine; Epoxyqueuosine; galactosyl-queuosine; Mannosylqueuosine; Queuosine; allyamino-thymidine; aza thymidine; deaza thymidine; deoxy-thymidine; 2′-O-methyluridine; 2-thiouridine; 3-methyluridine; 5-carboxymethyluridine; 5-hydroxyuridine; 5-methyluridine; 5-taurinomethyl-2-thiouridine; 5-taurinomethyluridine; Dihydrouridine; Pseudouridine; (3-(3-amino-3-carboxypropyl)uridine; 1-methyl-3-(3-amino-5-carboxypropyl)pseudouridine; 1-methylpseduouridine; 1-ethyl-pseudouridine; 2′-O-methyluridine; 2′-O-methylpseudouridine; 2′-O-methyluridine; 2-thio-2′-O-methyluridine; 3-(3-amino-3-carboxypropyl)uridine; 3,2′-O-dimethyluridine; 3-Methyl-pseudo-Uridine TP; 4-thiouridine; 5-(carboxyhydroxymethyl)uridine; 5-(carboxyhydroxymethyl)uridine methyl ester; 5,2′-O-dimethyluridine; 5,6-dihydro-uridine; 5-aminomethyl-2-thiouridine; 5-carbamoylmethyl-2′-O-methyluridine; 5-carbamoylmethyluridine; 5-carboxyhydroxymethyluridine; 5-carboxyhydroxymethyluridine methyl ester; 5-carboxymethylaminomethyl-2′-O-methyluridine; 5-carboxymethylaminomethyl-2-thiouridine; 5-carboxymethylaminomethyl-2-thiouridine; 5-carboxymethylaminomethyluridine; 5-carboxymethylaminomethyluridine; 5-Carbamoylmethyluridine TP; 5-methoxycarbonylmethyl-2′-O-methyluridine; 5-methoxycarbonylmethyl-2-thiouridine; 5-methoxycarbonylmethyluridine; 5-methyluridine), 5-methoxyuridine; 5-methyl-2-thiouridine; 5-methylaminomethyl-2-selenouridine; 5-methylaminomethyl-2-thiouridine; 5-methylaminomethyluridine; 5-Methyldihydrouridine; 5-Oxyacetic acid-Uridine TP; 5-Oxyacetic acid-methyl ester-Uridine TP; N1-methyl-pseudo-uracil; N1-ethyl-pseudo-uracil; uridine 5-oxyacetic acid; uridine 5-oxyacetic acid methyl ester; 3-(3-Amino-3-carboxypropyl)-Uridine TP; 5-(iso-Pentenylaminomethyl)-2-thiouridine TP; 5-(iso-Pentenylaminomethyl)-2′-O-methyluridine TP; 5-(iso-Pentenylaminomethyl)uridine TP; 5-propynyl uracil; α-thio-uridine; 1 (aminoalkylamino-carbonylethylenyl)-2(thio)-pseudouracil; 1 (aminoalkylaminocarbonylethylenyl)-2,4-(dithio)pseudouracil; 1 (aminoalkylaminocarbonylethylenyl)-4 (thio)pseudouracil; 1 (aminoalkylaminocarbonylethylenyl)-pseudouracil; 1 (aminocarbonylethylenyl)-2(thio)-pseudouracil; 1 (aminocarbonylethylenyl)-2,4-(dithio)pseudouracil; 1 (aminocarbonylethylenyl)-4 (thio)pseudouracil; 1 (aminocarbonylethylenyl)-pseudouracil; 1 substituted 2(thio)-pseudouracil; 1 substituted 2,4-(dithio)pseudouracil; 1 substituted 4 (thio)pseudouracil; 1 substituted pseudouracil; 1-(aminoalkylamino-carbonylethylenyl)-2-(thio)-pseudouracil; 1-Methyl-3-(3-amino-3-carboxypropyl) pseudouridine TP; 1-Methyl-3-(3-amino-3-carboxypropyl)pseudo-UTP; 1-Methyl-pseudo-UTP; 1-Ethyl-pseudo-UTP; 2 (thio)pseudouracil; 2′ deoxy uridine; 2′ fluorouridine; 2-(thio)uracil; 2,4-(dithio)psuedouracil; 2′ methyl, 2′amino, 2′azido, 2′fluro-guanosine; 2′-Amino-2′-deoxy-UTP; 2′-Azido-2′-deoxy-UTP; 2′-Azido-deoxyuridine TP; 2′-O-methylpseudouridine; 2′ deoxy uridine; 2′ fluorouridine; 2′-Deoxy-2′-a-aminouridine TP; 2′-Deoxy-2′-a-azidouridine TP; 2-methylpseudouridine; 3 (3 amino-3 carboxypropyl)uracil; 4 (thio)pseudouracil; 4-(thio)pseudouracil; 4-(thio)uracil; 4-thiouracil; 5 (1,3-diazole-1-alkyl)uracil; 5 (2-aminopropyl)uracil; 5 (aminoalkyl)uracil; 5 (dimethylaminoalkyl)uracil; 5 (guanidiniumalkyl)uracil; 5 (methoxycarbonylmethyl)-2-(thio)uracil; 5 (methoxycarbonyl-methyl)uracil; 5 (methyl) 2 (thio)uracil; 5 (methyl) 2,4 (dithio)uracil; 5 (methyl) 4 (thio)uracil; 5 (methylaminomethyl)-2 (thio)uracil; 5 (methylaminomethyl)-2,4 (dithio)uracil; 5 (methylaminomethyl)-4 (thio)uracil; 5 (propynyl)uracil; 5 (trifluoromethyl)uracil; 5-(2-aminopropyl)uracil; 5-(alkyl)-2-(thio)pseudouracil; 5-(alkyl)-2,4 (dithio)pseudouracil; 5-(alkyl)-4 (thio)pseudouracil; 5-(alkyl)pseudouracil; 5-(alkyl)uracil; 5-(alkynyl)uracil; 5-(allylamino)uracil; 5-(cyanoalkyl)uracil; 5-(dialkylaminoalkyl)uracil; 5-(dimethylaminoalkyl)uracil; 5-(guanidiniumalkyl)uracil; 5-(halo)uracil; 5-(1,3-diazole-1-alkyl)uracil; 5-(methoxy)uracil; 5-(methoxycarbonylmethyl)-2-(thio)uracil; 5-(methoxycarbonyl-methyl)uracil; 5-(methyl) 2(thio)uracil; 5-(methyl) 2,4 (dithio)uracil; 5-(methyl) 4 (thio)uracil; 5-(methyl)-2-(thio)pseudouracil; 5-(methyl)-2,4 (dithio)pseudouracil; 5-(methyl)-4 (thio)pseudouracil; 5-(methyl)pseudouracil; 5-(methylaminomethyl)-2 (thio)uracil; 5-(methylaminomethyl)-2,4(dithio)uracil; 5-(methylaminomethyl)-4-(thio)uracil; 5-(propynyl)uracil; 5-(trifluoromethyl)uracil; 5-aminoallyl-uridine; 5-bromo-uridine; 5-iodo-uridine; 5-uracil; 6 (azo)uracil; 6-(azo)uracil; 6-aza-uridine; allyamino-uracil; aza uracil; deaza uracil; N3 (methyl)uracil; Pseudo-UTP-1-2-ethanoic acid; Pseudouracil; 4-Thio-pseudo-UTP; 1-carboxymethyl-pseudouridine; 1-methyl-1-deaza-pseudouridine; 1-propynyl-uridine; 1-taurinomethyl-1-methyl-uridine; 1-taurinomethyl-4-thio-uridine; 1-taurinomethyl-pseudouridine; 2-methoxy-4-thio-pseudouridine; 2-thio-1-methyl-1-deaza-pseudouridine; 2-thio-1-methyl-pseudouridine; 2-thio-5-aza-uridine; 2-thio-dihydropseudouridine; 2-thio-dihydrouridine; 2-thio-pseudouridine; 4-methoxy-2-thio-pseudouridine; 4-methoxy-pseudouridine; 4-thio-1-methyl-pseudouridine; 4-thio-pseudouridine; 5-aza-uridine; Dihydropseudouridine; (+)1-(2-Hydroxypropyl)pseudouridine TP; (2R)-1-(2-Hydroxypropyl)pseudouridine TP; (2S)-1-(2-Hydroxypropyl)pseudouridine TP; (E)-5-(2-Bromo-vinyl)ara-uridine TP; (E)-5-(2-Bromo-vinyl)uridine TP; (Z)-5-(2-Bromo-vinyl)ara-uridine TP; (Z)-5-(2-Bromo-vinyl)uridine TP; 1-(2,2,2-Trifluoroethyl)-pseudo-UTP; 1-(2,2,3,3,3-Pentafluoropropyl)pseudouridine TP; 1-(2,2-Diethoxyethyl)pseudouridine TP; 1-(2,4,6-Trimethylbenzyl)pseudouridine TP; 1-(2,4,6-Trimethyl-benzyl)pseudo-UTP; 1-(2,4,6-Trimethyl-phenyl)pseudo-UTP; 1-(2-Amino-2-carboxyethyl)pseudo-UTP; 1-(2-Amino-ethyl)pseudo-UTP; 1-(2-Hydroxyethyl)pseudouridine TP; 1-(2-Methoxyethyl)pseudouridine TP; 1-(3,4-Bis-trifluoromethoxybenzyl)pseudouridine TP; 1-(3,4-Dimethoxybenzyl)pseudouridine TP; 1-(3-Amino-3-carboxypropyl)pseudo-UTP; 1-(3-Amino-propyl)pseudo-UTP; 1-(3-Cyclopropyl-prop-2-ynyl)pseudouridine TP; 1-(4-Amino-4-carboxybutyl)pseudo-UTP; 1-(4-Amino-benzyl)pseudo-UTP; 1-(4-Amino-butyl)pseudo-UTP; 1-(4-Amino-phenyl)pseudo-UTP; 1-(4-Azidobenzyl)pseudouridine TP; 1-(4-Bromobenzyl)pseudouridine TP; 1-(4-Chlorobenzyl)pseudouridine TP; 1-(4-Fluorobenzyl)pseudouridine TP; 1-(4-Iodobenzyl)pseudouridine TP; 1-(4-Methanesulfonylbenzyl)pseudouridine TP; 1-(4-Methoxybenzyl)pseudouridine TP; 1-(4-Methoxy-benzyl)pseudo-UTP; 1-(4-Methoxy-phenyl)pseudo-UTP; 1-(4-Methylbenzyl)pseudouridine TP; 1-(4-Methyl-benzyl)pseudo-UTP; 1-(4-Nitrobenzyl)pseudouridine TP; 1-(4-Nitro-benzyl)pseudo-UTP; 1(4-Nitro-phenyl)pseudo-UTP; 1-(4-Thiomethoxybenzyl)pseudouridine TP; 1-(4-Trifluoromethoxybenzyl)pseudouridine TP; 1-(4-Trifluoromethylbenzyl)pseudouridine TP; 1-(5-Amino-pentyl)pseudo-UTP; 1-(6-Amino-hexyl)pseudo-UTP; 1,6-Dimethyl-pseudo-UTP; 1-[3-(2-{2-[2-(2-Aminoethoxy)-ethoxy]-oxyoxy}-ethoxy)-propionyl]pseudouridine TP; 1-{3-[2-(2-Aminoethoxy)-ethoxy]-propionyl}pseudouridine TP; 1-Acetylpseudouridine TP; 1-Alkyl-6-(1-propynyl)-pseudo-UTP; 1-Alkyl-6-(2-propynyl)-pseudo-UTP; 1-Alkyl-6-allyl-pseudo-UTP; 1-Alkyl-6-ethynyl-pseudo-UTP; 1-Alkyl-6-homoallyl-pseudo-UTP; 1-Alkyl-6-vinyl-pseudo-UTP; 1-Allylpseudouridine TP; 1-Aminomethyl-pseudo-UTP; 1-Benzoylpseudouridine TP; 1-Benzyloxymethylpseudouridine TP; 1-Benzyl-pseudo-UTP; 1-Biotinyl-PEG2-pseudouridine TP; 1-Biotinylpseudouridine TP; 1-Butyl-pseudo-UTP; 1-Cyanomethylpseudouridine TP; 1-Cyclobutylmethyl-pseudo-UTP; 1-Cyclobutyl-pseudo-UTP; 1-Cycloheptylmethyl-pseudo-UTP; 1-Cycloheptyl-pseudo-UTP; 1-Cyclohexylmethyl-pseudo-UTP; 1-Cyclohexyl-pseudo-UTP; 1-Cyclooctylmethyl-pseudo-UTP; 1-Cyclooctyl-pseudo-UTP; 1-Cyclopentylmethyl-pseudo-UTP; 1-Cyclopentyl-pseudo-UTP; 1-Cyclopropylmethyl-pseudo-UTP; 1-Cyclopropyl-pseudo-UTP; 1-Ethyl-pseudo-UTP; 1-Hexyl-pseudo-UTP; 1-Homoallylpseudouridine TP; 1-Hydroxymethylpseudouridine TP; 1-iso-propyl-pseudo-UTP; 1-Me-2-thio-pseudo-UTP; 1-Me-4-thio-pseudo-UTP; 1-Me-alpha-thio-pseudo-UTP; 1-Methanesulfonylmethylpseudouridine TP; 1-Methoxymethylpseudouridine TP; 1-Methyl-6-(2,2,2-Trifluoroethyl)pseudo-UTP; 1-Methyl-6-(4-morpholino)-pseudo-UTP; 1-Methyl-6-(4-thiomorpholino)-pseudo-UTP; 1-Methyl-6-(substituted phenyl)pseudo-UTP; 1-Methyl-6-amino-pseudo-UTP; 1-Methyl-6-azido-pseudo-UTP; 1-Methyl-6-bromo-pseudo-UTP; 1-Methyl-6-butyl-pseudo-UTP; 1-Methyl-6-chloro-pseudo-UTP; 1-Methyl-6-cyano-pseudo-UTP; 1-Methyl-6-dimethylamino-pseudo-UTP; 1-Methyl-6-ethoxy-pseudo-UTP; 1-Methyl-6-ethylcarboxylate-pseudo-UTP; 1-Methyl-6-ethyl-pseudo-UTP; 1-Methyl-6-fluoro-pseudo-UTP; 1-Methyl-6-formyl-pseudo-UTP; 1-Methyl-6-hydroxyamino-pseudo-UTP; 1-Methyl-6-hydroxy-pseudo-UTP; 1-Methyl-6-iodo-pseudo-UTP; 1-Methyl-6-iso-propyl-pseudo-UTP; 1-Methyl-6-methoxy-pseudo-UTP; 1-Methyl-6-methylamino-pseudo-UTP; 1-Methyl-6-phenyl-pseudo-UTP; 1-Methyl-6-propyl-pseudo-UTP; 1-Methyl-6-tert-butyl-pseudo-UTP; 1-Methyl-6-trifluoromethoxy-pseudo-UTP; 1-Methyl-6-trifluoromethyl-pseudo-UTP; 1-Morpholinomethylpseudouridine TP; 1-Pentyl-pseudo-UTP; 1-Phenyl-pseudo-UTP; 1-Pivaloylpseudouridine TP; 1-Propargylpseudouridine TP; 1-Propyl-pseudo-UTP; 1-propynyl-pseudouridine; 1-p-tolyl-pseudo-UTP; 1-tert-Butyl-pseudo-UTP; 1-Thiomethoxymethylpseudouridine TP; 1-Thiomorpholinomethylp seudouridine TP; 1-Trifluoroacetylpseudouridine TP; 1-Trifluoromethyl-pseudo-UTP; 1-Vinylpseudouridine TP; 2,2′-anhydro-uridine TP; 2′-bromo-deoxyuridine TP; 2′-F-5-Methyl-2′-deoxy-UTP; 2′-OMe-5-Me-UTP; 2′-OMe-pseudo-UTP; 2′-a-Ethynyluridine TP; 2′-a-Trifluoromethyluridine TP; 2′-b-Ethynyluridine TP; 2′-b-Trifluoromethyluridine TP; 2′-Deoxy-2′,2′-difluorouridine TP; 2′-Deoxy-2′-a-mercaptouridine TP; 2′-Deoxy-2′-a-thiomethoxyuridine TP; 2′-Deoxy-2′-b-aminouridine TP; 2′-Deoxy-2′-b-azidouridine TP; 2′-Deoxy-2′-b-bromouridine TP; 2′-Deoxy-2′-b-chlorouridine TP; 2′-Deoxy-2′-b-fluorouridine TP; 2′-Deoxy-2′-b-iodouridine TP; 2′-Deoxy-2′-b-mercaptouridine TP; 2′-Deoxy-2′-b-thiomethoxyuridine TP; 2-methoxy-4-thio-uridine; 2-methoxyuridine; 2′-O-Methyl-5-(1-propynyl)uridine TP; 3-Alkyl-pseudo-UTP; 4′-Azidouridine TP; 4′-Carbocyclic uridine TP; 4′-Ethynyluridine TP; 5-(1-Propynyl)ara-uridine TP; 5-(2-Furanyl)uridine TP; 5-Cyanouridine TP; 5-Dimethylaminouridine TP; 5′-Homo-uridine TP; 5-iodo-2′-fluoro-deoxyuridine TP; 5-Phenylethynyluridine TP; 5-Trideuteromethyl-6-deuterouridine TP; 5-Trifluoromethyl-Uridine TP; 5-Vinylarauridine TP; 6-(2,2,2-Trifluoroethyl)-pseudo-UTP; 6-(4-Morpholino)-pseudo-UTP; 6-(4-Thiomorpholino)-pseudo-UTP; 6-(Substituted-Phenyl)-pseudo-UTP; 6-Amino-pseudo-UTP; 6-Azido-pseudo-UTP; 6-Bromo-pseudo-UTP; 6-Butyl-pseudo-UTP; 6-Chloro-pseudo-UTP; 6-Cyano-pseudo-UTP; 6-Dimethylamino-pseudo-UTP; 6-Ethoxy-pseudo-UTP; 6-Ethylcarboxylate-pseudo-UTP; 6-Ethyl-pseudo-UTP; 6-Fluoro-pseudo-UTP; 6-Formyl-pseudo-UTP; 6-Hydroxyamino-pseudo-UTP; 6-Hydroxy-pseudo-UTP; 6-Iodo-pseudo-UTP; 6-iso-Propyl-pseudo-UTP; 6-Methoxy-pseudo-UTP; 6-Methylamino-pseudo-UTP; 6-Methyl-pseudo-UTP; 6-Phenyl-pseudo-UTP; 6-Phenyl-pseudo-UTP; 6-Propyl-pseudo-UTP; 6-tert-Butyl-pseudo-UTP; 6-Trifluoromethoxy-pseudo-UTP; 6-Trifluoromethyl-pseudo-UTP; Alpha-thio-pseudo-UTP; Pseudouridine 1-(4-methylbenzenesulfonic acid) TP; Pseudouridine 1-(4-methylbenzoic acid) TP; Pseudouridine TP 1-[3-(2-ethoxy)]propionic acid; Pseudouridine TP 1-[3-{2-(2-[2-(2-ethoxy)-ethoxy]-ethoxy)-ethoxy}]propionic acid; Pseudouridine TP 1-[3-{2-(2-[2-{2(2-ethoxy)-ethoxy}-ethoxy]-ethoxy)-ethoxy}]propionic acid; Pseudouridine TP 1-[3-{2-(2-[2-ethoxy]-ethoxy)-ethoxy}]propionic acid; Pseudouridine TP 1-[3-{2-(2-ethoxy)-ethoxy}] propionic acid; Pseudouridine TP 1-methylphosphonic acid; Pseudouridine TP 1-methylphosphonic acid diethyl ester; Pseudo-UTP-N1-3-propionic acid; Pseudo-UTP-N1-4-butanoic acid; Pseudo-UTP-N1-5-pentanoic acid; Pseudo-UTP-N1-6-hexanoic acid; Pseudo-UTP-N1-7-heptanoic acid; Pseudo-UTP-N1-methyl-p-benzoic acid; Pseudo-UTP-N1-p-benzoic acid; Wybutosine; Hydroxywybutosine; Isowyosine; Peroxywybutosine; undermodified hydroxywybutosine; 4-demethylwyosine; 2,6-(diamino)purine; 1-(aza)-2-(thio)-3-(aza)-phenoxazin-1-yl: 1,3-(diaza)-2-(oxo)-phenthiazin-1-yl; 1,3-(diaza)-2-(oxo)-phenoxazin-1-yl; 1,3,5-(triaza)-2,6-(dioxa)-naphthalene; 2 (amino)purine; 2,4,5-(trimethyl)phenyl; 2′ methyl, 2′amino, 2′azido, 2′fluro-cytidine; 2′ methyl, 2′amino, 2′azido, 2′fluro-adenine; 2′methyl, 2′amino, 2′azido, 2′fluro-uridine; 2′-amino-2′-deoxyribose; 2-amino-6-Chloro-purine; 2-aza-inosinyl; 2′-azido-2′-deoxyribose; 2′fluoro-2′-deoxyribose; 2′-fluoro-modified bases; 2′-O-methyl-ribose; 2-oxo-7-aminopyridopyrimidin-3-yl; 2-oxo-pyridopyrimidine-3-yl; 2-pyridinone; 3 nitropyrrole; 3-(methyl)-7-(propynyl)isocarbostyrilyl; 3-(methyl)isocarbostyrilyl; 4-(fluoro)-6-(methyl)benzimidazole; 4-(methyl)benzimidazole; 4-(methyl)indolyl; 4,6-(dimethyl)indolyl; 5 nitroindole; 5 substituted pyrimidines; 5-(methyl)isocarbostyrilyl; 5-nitroindole; 6-(aza)pyrimidine; 6-(azo)thymine; 6-(methyl)-7-(aza)indolyl; 6-chloro-purine; 6-phenyl-pyrrolo-pyrimidin-2-on-3-yl; 7-(aminoalkylhydroxy)-1-(aza)-2-(thio)-3-(aza)-phenthiazin-1-yl; 7-(aminoalkylhydroxy)-1-(aza)-2-(thio)-3-(aza)-phenoxazin-1-yl; 7-(aminoalkylhydroxy)-1,3-(diaza)-2-(oxo)-phenoxazin-1-yl; 7-(aminoalkylhydroxy)-1,3-(diaza)-2-(oxo)-phenthiazin-1-yl; 7-(aminoalkylhydroxy)-1,3-(diaza)-2-(oxo)-phenoxazin-1-yl; 7-(aza)indolyl; 7-(guanidiniumalkylhydroxy)-1-(aza)-2-(thio)-3-(aza)-phenoxazinl-yl; 7-(guanidiniumalkylhydroxy)-1-(aza)-2-(thio)-3-(aza)-phenthiazin-1-yl; 7-(guanidiniumalkylhydroxy)-1-(aza)-2-(thio)-3-(aza)-phenoxazin-1-yl; 7-(guanidiniumalkylhydroxy)-1,3-(diaza)-2-(oxo)-phenoxazin-1-yl; 7-(guanidiniumalkyl-hydroxy)-1,3-(diaza)-2-(oxo)-phenthiazin-1-yl; 7-(guanidiniumalkylhydroxy)-1,3-(diaza)-2-(oxo)-phenoxazin-1-yl; 7-(propynyl)isocarbostyrilyl; 7-(propynyl)isocarbostyrilyl, propynyl-7-(aza)indolyl; 7-deaza-inosinyl; 7-substituted 1-(aza)-2-(thio)-3-(aza)-phenoxazin-1-yl; 7-substituted 1,3-(diaza)-2-(oxo)-phenoxazin-1-yl; 9-(methyl)-imidizopyridinyl; Aminoindolyl; Anthracenyl; bis-ortho-(aminoalkylhydroxy)-6-phenyl-pyrrolo-pyrimidin-2-on-3-yl; bis-ortho-substituted-6-phenyl-pyrrolo-pyrimidin-2-on-3-yl; Difluorotolyl; Hypoxanthine; Imidizopyridinyl; Inosinyl; Isocarbostyrilyl; Isoguanisine; N2-substituted purines; N6-methyl-2-amino-purine; N6-substituted purines; N-alkylated derivative; Napthalenyl; Nitrobenzimidazolyl; Nitroimidazolyl; Nitroindazolyl; Nitropyrazolyl; Nubularine; 06-substituted purines; O-alkylated derivative; ortho-(aminoalkylhydroxy)-6-phenyl-pyrrolo-pyrimidin-2-on-3-yl; ortho-substituted-6-phenyl-pyrrolo-pyrimidin-2-on-3-yl; Oxoformycin TP; para-(aminoalkylhydroxy)-6-phenyl-pyrrolo-pyrimidin-2-on-3-yl; para-substituted-6-phenyl-pyrrolo-pyrimidin-2-on-3-yl; Pentacenyl; Phenanthracenyl; Phenyl; propynyl-7-(aza)indolyl; Pyrenyl; pyridopyrimidin-3-yl; pyridopyrimidin-3-yl, 2-oxo-7-amino-pyridopyrimidin-3-yl; pyrrolo-pyrimidin-2-on-3-yl; Pyrrolopyrimidinyl; Pyrrolopyrizinyl; Stilbenzyl; substituted 1,2,4-triazoles; Tetracenyl; Tubercidine; Xanthine; Xanthosine-5′-TP; 2-thio-zebularine; 5-aza-2-thio-zebularine; 7-deaza-2-amino-purine; pyridin-4-one ribonucleoside; 2-Amino-riboside-TP; Formycin A TP; Formycin B TP; Pyrrolosine TP; 2′-OH-ara-adenosine TP; 2′-OH-ara-cytidine TP; 2′-OH-ara-uridine TP; 2′-OH-ara-guanosine TP; 5-(2-carbomethoxyvinyl)uridine TP; and N6-(19-Amino-pentaoxanonadecyl)adenosine TP.

[0367] In some embodiments, the polynucleotide (e.g., RNA polynucleotide, such as mRNA polynucleotide) includes a combination of at least two (e.g., 2, 3, 4 or more) of the aforementioned modified nucleobases.

[0368] In some embodiments, the mRNA comprises at least one chemically modified nucleoside. In some embodiments, the at least one chemically modified nucleoside is selected from the group consisting of pseudouridine (v), 2-thiouridine (s2U), 4′-thiouridine, 5-methylcytosine, 2-thio-1-methyl-1-deaza-pseudouridine, 2-thio-1-methyl-pseudouridine, 2-thio-5-aza-uridine, 2-thio-dihydropseudouridine, 2-thio-dihydrouridine, 2-thio-pseudouridine, 4-methoxy-2-thio-pseudouridine, 4-methoxy-pseudouridine, 4-thio-1-methyl-pseudouridine, 4-thio-pseudouridine, 5-aza-uridine, dihydropseudouridine, 5-methyluridine, 5-methoxyuridine, 2′-O-methyl uridine, 1-methyl-pseudouridine (m1ψ), 1-ethyl-pseudouridine (e1ψ), 5-methoxy-uridine (mo5U), 5-methyl-cytidine (m5C), α-thio-guanosine, α-thio-adenosine, 5-cyano uridine, 4′-thio uridine 7-deaza-adenine, 1-methyl-adenosine (m1A), 2-methyl-adenine (m2A), N6-methyl-adenosine (m6A), and 2,6-Diaminopurine, (I), 1-methyl-inosine (m1I), wyosine (imG), methylwyosine (mimG), 7-deaza-guanosine, 7-cyano-7-deaza-guanosine (preQ0), 7-aminomethyl-7-deaza-guanosine (preQ1), 7-methyl-guanosine (m7G), 1-methyl-guanosine (m1G), 8-oxo-guanosine, 7-methyl-8-oxo-guanosine, 2,8-dimethyladenosine, 2-geranylthiouridine, 2-lysidine, 2-selenouridine, 3-(3-amino-3-carboxypropyl)-5,6-dihydrouridine, 3-(3-amino-3-carboxypropyl)pseudouridine, 3-methylpseudouridine, 5-(carboxyhydroxymethyl)-2′-O-methyluridine methyl ester, 5-aminomethyl-2-geranylthiouridine, 5-aminomethyl-2-selenouridine, 5-aminomethyluridine, 5-carbamoylhydroxymethyluridine, 5-carbamoylmethyl-2-thiouridine, 5-carboxymethyl-2-thiouridine, 5-carboxymethylaminomethyl-2-geranylthiouridine, 5-carboxymethylaminomethyl-2-selenouridine, 5-cyanomethyluridine, 5-hydroxycytidine, 5-methylaminomethyl-2-geranylthiouridine, 7-aminocarboxypropyl-demethylwyosine, 7-aminocarboxypropylwyosine, 7-aminocarboxypropylwyosine methyl ester, 8-methyladenosine, N4,N4-dimethylcytidine, N6-formyladenosine, N6-hydroxymethyladenosine, agmatidine, cyclic N6-threonylcarbamoyladenosine, glutamyl-queuosine, methylated undermodified hydroxywybutosine, N4,N4,2′-O-trimethylcytidine, geranylated 5-methylaminomethyl-2-thiouridine, geranylated 5-carboxymethylaminomethyl-2-thiouridine, Qbase, preQ0base, preQ1base, and two or more combinations thereof. In some embodiments, the at least one chemically modified nucleoside is selected from the group consisting of pseudouridine, 1-methyl-pseudouridine, 1-ethyl-pseudouridine, 5-methylcytosine, 5-methoxyuridine, and a combination thereof. In some embodiments, the polynucleotide (e.g., RNA polynucleotide, such as mRNA polynucleotide) includes a combination of at least two (e.g., 2, 3, 4 or more) of the aforementioned modified nucleobases.

### Base Modifications

[0369] In certain embodiments, the chemical modification is at nucleobases in the polynucleotides (e.g., RNA polynucleotide, such as mRNA polynucleotide). In some embodiments, modified nucleobases in the polynucleotide (e.g., RNA polynucleotide, such as mRNA polynucleotide) are selected from the group consisting of 1-methyl-pseudouridine (m1ψ), 1-ethyl-pseudouridine (e1ψ), 5-methoxy-uridine (mo5U), 5-methyl-cytidine (m5C), pseudouridine (ψ), α-thio-guanosine and α-thio-adenosine. In some embodiments, the polynucleotide includes a combination of at least two (e.g., 2, 3, 4 or more) of the aforementioned modified nucleobases.

[0370] In some embodiments, the polynucleotide (e.g., RNA polynucleotide, such as mRNA polynucleotide) comprises pseudouridine (ψ) and 5-methyl-cytidine (m5C). In some embodiments, the polynucleotide (e.g., RNA polynucleotide, such as mRNA polynucleotide) comprises 1-methyl-pseudouridine (m1ψ). In some embodiments, the polynucleotide (e.g., RNA polynucleotide, such as mRNA polynucleotide) comprises 1-ethyl-pseudouridine (e1ψ). In some embodiments, the polynucleotide (e.g., RNA polynucleotide, such as mRNA polynucleotide) comprises 1-methyl-pseudouridine (m1ψ) and 5-methyl-cytidine (m5C). In some embodiments, the polynucleotide (e.g., RNA polynucleotide, such as mRNA polynucleotide) comprises 1-ethyl-pseudouridine (e1ψ) and 5-methyl-cytidine (m5C). In some embodiments, the polynucleotide (e.g., RNA polynucleotide, such as mRNA polynucleotide) comprises 2-thiouridine (s2U). In some embodiments, the polynucleotide (e.g., RNA polynucleotide, such as mRNA polynucleotide) comprises 2-thiouridine and 5-methyl-cytidine (m5C). In some embodiments, the polynucleotide (e.g., RNA polynucleotide, such as mRNA polynucleotide) comprises methoxy-uridine (mo5U). In some embodiments, the polynucleotide (e.g., RNA polynucleotide, such as mRNA polynucleotide) comprises 5-methoxy-uridine (mo5U) and 5-methyl-cytidine (m5C). In some embodiments, the polynucleotide (e.g., RNA polynucleotide, such as mRNA polynucleotide) comprises 2′-O-methyl uridine. In some embodiments, the polynucleotide (e.g., RNA polynucleotide, such as mRNA polynucleotide) comprises 2′-O-methyl uridine and 5-methyl-cytidine (m5C). In some embodiments, the polynucleotide (e.g., RNA polynucleotide, such as mRNA polynucleotide) comprises N6-methyl-adenosine (m6A). In some embodiments, the polynucleotide (e.g., RNA polynucleotide, such as mRNA polynucleotide) comprises N6-methyl-adenosine (m6A) and 5-methyl-cytidine (m5C).

[0371] In some embodiments, the polynucleotide (e.g., RNA polynucleotide, such as mRNA polynucleotide) is uniformly modified (e.g., fully modified, modified throughout the entire sequence) for a particular modification. For example, a polynucleotide can be uniformly modified with 5-methyl-cytidine (m5C), meaning that all cytosine residues in the mRNA sequence are replaced with 5-methyl-cytidine (m5C). Similarly, a polynucleotide can be uniformly modified for any type of nucleoside residue present in the sequence by replacement with a modified residue such as any of those set forth above.

[0372] In some embodiments, the chemically modified nucleosides in the open reading frame are selected from the group consisting of uridine, adenine, cytosine, guanine, and any combination thereof.

[0373] In some embodiments, the modified nucleobase is a modified cytosine. Examples of nucleobases and nucleosides having a modified cytosine include N4-acetyl-cytidine (ac4C), 5-methyl-cytidine (m5C), 5-halo-cytidine (e.g., 5-iodo-cytidine), 5-hydroxymethyl-cytidine (hm5C), 1-methyl-pseudoisocytidine, 2-thio-cytidine (s2C), 2-thio-5-methyl-cytidine.

[0374] In some embodiments, a modified nucleobase is a modified uridine. Example nucleobases and nucleosides having a modified uridine include 5-cyano uridine or 4′-thio uridine.

[0375] In some embodiments, a modified nucleobase is a modified adenine. Example nucleobases and nucleosides having a modified adenine include 7-deaza-adenine, 1-methyl-adenosine (m1A), 2-methyl-adenine (m2A), N6-methyl-adenine (m6A), and 2,6-Diaminopurine.

[0376] In some embodiments, a modified nucleobase is a modified guanine. Example nucleobases and nucleosides having a modified guanine include inosine (I), 1-methyl-inosine (m1I), wyosine (imG), methylwyosine (mimG), 7-deaza-guanosine, 7-cyano-7-deaza-guanosine (preQ0), 7-aminomethyl-7-deaza-guanosine (preQ1), 7-methyl-guanosine (m7G), 1-methyl-guanosine (m1G), 8-oxo-guanosine, 7-methyl-8-oxo-guanosine.

[0377] In some embodiments, the nucleobase modified nucleotides in the polynucleotide (e.g., RNA polynucleotide, such as mRNA polynucleotide) are 5-methoxyuridine.

[0378] In some embodiments, the polynucleotide (e.g., RNA polynucleotide, such as mRNA polynucleotide) includes a combination of at least two (e.g., 2, 3, 4 or more) of modified nucleobases.

[0379] In some embodiments, at least 95% of a type of nucleobases (e.g., uracil) in a polynucleotide of the disclosure (e.g., an mRNA polynucleotide encoding MCM) are modified nucleobases. In some embodiments, at least 95% of uracil in a polynucleotide of the present disclosure (e.g., an mRNA polynucleotide encoding MCM) is 5-methoxyuracil.

[0380] In some embodiments, the polynucleotide (e.g., RNA polynucleotide, such as mRNA polynucleotide) comprises 5-methoxyuridine (5mo5U) and 5-methyl-cytidine (m5C).

[0381] In some embodiments, the polynucleotide (e.g., RNA polynucleotide, such as mRNA polynucleotide) is uniformly modified (e.g., fully modified, modified throughout the entire sequence) for a particular modification. For example, a polynucleotide can be uniformly modified with 5-methoxyuridine, meaning that substantially all uridine residues in the mRNA sequence are replaced with 5-methoxyuridine. Similarly, a polynucleotide can be uniformly modified for any type of nucleoside residue present in the sequence by replacement with a modified residue such as any of those set forth above.

[0382] In some embodiments, the modified nucleobase is a modified cytosine.

[0383] In some embodiments, a modified nucleobase is a modified uracil. Example nucleobases and nucleosides having a modified uracil include 5-methoxyuracil.

[0384] In some embodiments, a modified nucleobase is a modified adenine.

[0385] In some embodiments, a modified nucleobase is a modified guanine.

[0386] In some embodiments, the nucleobases, sugar, backbone, or any combination thereof in the open reading frame encoding an MCM polypeptide are chemically modified by at least 10%, at least 20%, at least 30%, at least 40%, at least 50%, at least 60%, at least 70%, at least 80%, at least 90%, at least 95%, at least 99%, or 100%.

[0387] In some embodiments, the uridine nucleosides in the open reading frame encoding an MCM polypeptide are chemically modified by at least 10%, at least 20%, at least 30%, at least 40%, at least 50%, at least 60%, at least 70%, at least 80%, at least 90%, at least 95%, at least 99%, or 100%.

[0388] In some embodiments, the adenosine nucleosides in the open reading frame encoding an MCM polypeptide are chemically modified by at least 10%, at least 20%, at least 30%, at least 40%, at least 50%, at least 60%, at least 70%, at least 80%, at least 90%, at least 95%, at least 99%, or 100%.

[0389] In some embodiments, the cytidine nucleosides in the open reading frame encoding an MCM polypeptide are chemically modified by at least at least 10%, at least 20%, at least 30%, at least 40%, at least 50%, at least 60%, at least 70%, at least 80%, at least 90%, at least 95%, at least 99%, or 100%.

[0390] In some embodiments, the guanosine nucleosides in the open reading frame encoding an MCM polypeptide are chemically modified by at least at least 10%, at least 20%, at least 30%, at least 40%, at least 50%, at least 60%, at least 70%, at least 80%, at least 90%, at least 95%, at least 99%, or 100%.

[0391] In some embodiments, the polynucleotides can include any useful linker between the nucleosides. Such linkers, including backbone modifications, that are useful in the composition of the present disclosure include, but are not limited to the following: 3′-alkylene phosphonates, 3′-amino phosphoramidate, alkene containing backbones, aminoalkylphosphoramidates, aminoalkylphosphotriesters, boranophosphates, —CH₂—O—N(CH₃)—CH₂—, —CH₂—N(CH₃)—N(CH₃)—CH₂—, —CH₂—NH—CH₂—, chiral phosphonates, chiral phosphorothioates, formacetyl and thioformacetyl backbones, methylene (methylimino), methylene formacetyl and thioformacetyl backbones, methyleneimino and methylenehydrazino backbones, morpholino linkages, —N(CH₃)—CH₂—CH₂—, oligonucleosides with heteroatom internucleoside linkage, phosphinates, phosphoramidates, phosphorodithioates, phosphorothioate internucleoside linkages, phosphorothioates, phosphotriesters, PNA, siloxane backbones, sulfamate backbones, sulfide sulfoxide and sulfone backbones, sulfonate and sulfonamide backbones, thionoalkylphosphonates, thionoalkylphosphotriesters, and thionophosphoramidates.

### Modifications on the Sugar

[0392] The modified nucleosides and nucleotides (e.g., building block molecules), which can be incorporated into a polynucleotide (e.g., RNA or mRNA, as described herein), can be modified on the sugar of the ribonucleic acid. For example, the 2′ hydroxyl group (OH) can be modified or replaced with a number of different substituents. Exemplary substitutions at the 2′-position include, but are not limited to, H, halo, optionally substituted C₁₋₆ alkyl; optionally substituted C₁₋₆ alkoxy; optionally substituted C₆₋₁₀ aryloxy; optionally substituted C₃₋₈ cycloalkyl; optionally substituted C₃₋₈ cycloalkoxy; optionally substituted C₆₋₁₀ aryloxy; optionally substituted C₆₋₁₀ aryl-C₁₋₆ alkoxy, optionally substituted C₁₋₁₂ (heterocyclyl)oxy; a sugar (e.g., ribose, pentose, or any described herein); a polyethyleneglycol (PEG), —O(CH₂CH₂O)ₙCH₂CH₂OR, where R is H or optionally substituted alkyl, and n is an integer from 0 to 20 (e.g., from 0 to 4, from 0 to 8, from 0 to 10, from 0 to 16, from 1 to 4, from 1 to 8, from 1 to 10, from 1 to 16, from 1 to 20, from 2 to 4, from 2 to 8, from 2 to 10, from 2 to 16, from 2 to 20, from 4 to 8, from 4 to 10, from 4 to 16, and from 4 to 20); “locked” nucleic acids (LNA) in which the 2′-hydroxyl is connected by a C₁₋₆ alkylene or C₁₋₆ heteroalkylene bridge to the 4′-carbon of the same ribose sugar, where exemplary bridges included methylene, propylene, ether, or amino bridges; aminoalkyl, as defined herein; aminoalkoxy, as defined herein; amino as defined herein; and amino acid, as defined herein

[0393] Generally, RNA includes the sugar group ribose, which is a 5-membered ring having an oxygen. Exemplary, non-limiting modified nucleotides include replacement of the oxygen in ribose (e.g., with S, Se, or alkylene, such as methylene or ethylene); addition of a double bond (e.g., to replace ribose with cyclopentenyl or cyclohexenyl); ring contraction of ribose (e.g., to form a 4-membered ring of cyclobutane or oxetane); ring expansion of ribose (e.g., to form a 6- or 7-membered ring having an additional carbon or heteroatom, such as for anhydrohexitol, altritol, mannitol, cyclohexanyl, cyclohexenyl, and morpholino that also has a phosphoramidate backbone); multicyclic forms (e.g., tricyclo; and “unlocked” forms, such as glycol nucleic acid (GNA) (e.g., R-GNA or S-GNA, where ribose is replaced by glycol units attached to phosphodiester bonds), threose nucleic acid (TNA, where ribose is replace with α-L-threofuranosyl-(3′→2′)), and peptide nucleic acid (PNA, where 2-amino-ethyl-glycine linkages replace the ribose and phosphodiester backbone). The sugar group can also contain one or more carbons that possess the opposite stereochemical configuration than that of the corresponding carbon in ribose. Thus, a polynucleotide molecule can include nucleotides containing, e.g., arabinose, as the sugar. Such sugar modifications are taught International Patent Publication No. WO2013052523 and International Patent Application No. PCT/US2013/75177, the contents of each of which are incorporated herein by reference in its entirety.

### Combinations of Modifications

[0394] The polynucleotides of the disclosure can include a combination of modifications to the sugar, the nucleobase, and/or the internucleoside linkage. These combinations can include any one or more modifications described herein.

[0395] Examples of modified nucleotides and modified nucleotide combinations are provided below in Table 4. These combinations of modified nucleotides can be used to form the polynucleotides of the disclosure. Unless otherwise noted, the modified nucleotides can be completely substituted for the natural nucleotides of the polynucleotides of the disclosure. As a non-limiting example, the natural nucleotide uridine can be substituted with a modified nucleoside described herein. In another non-limiting example, the natural nucleotide uridine can be partially substituted (e.g., about 0.1%, 1%, 5%, 10%, 15%, 20%, 25%, 30%, 35%, 40%, 45%, 50%, 55%, 60%, 65%, 70%, 75%, 80%, 85%, 90%, 95% or 99.9%) with at least one of the modified nucleoside disclosed herein. Any combination of base/sugar or linker can be incorporated into the polynucleotides of the disclosure and such modifications are taught in International Patent Publication No. WO2013052523 and International Patent Application No. PCT/US2013/75177, the contents of each of which are incorporated herein by reference in its entirety.

TABLE 4
Combinations

| Uracil | Cytosine | Adenine | Guanine |
|---|---|---|---|
| 5-methoxy-UTP | CTP | ATP | GTP |
| 5-Methoxy-UTP | N4Ac-CTP | ATP | GTP |
| 5-Methoxy-UTP | 5-Methyl-CTP | ATP | GTP |
| 5-Methoxy-UTP | 5-Trifluoromethyl-CTP | ATP | GTP |
| 5-Methoxy-UTP | 5-Hydroxymethyl-CTP | ATP | GTP |
| 5-Methoxy-UTP | 5-Bromo-CTP | ATP | GTP |
| 5-Methoxy-UTP | N4Ac-CTP | ATP | GTP |
| 5-Methoxy-UTP | CTP | ATP | GTP |
| 5-Methoxy-UTP | 5-Methyl-CTP | ATP | GTP |
| 5-Methoxy-UTP | 5-Trifluoromethyl-CTP | ATP | GTP |
| 5-Methoxy-UTP | 5-Hydroxymethyl-CTP | ATP | GTP |
| 5-Methoxy-UTP | 5-Bromo-CTP | ATP | GTP |
| 5-Methoxy-UTP | N4—Ac-CTP | ATP | GTP |
| 5-Methoxy-UTP | 5-Iodo-CTP | ATP | GTP |
| 5-Methoxy-UTP | 5-Bromo-CTP | ATP | GTP |
| 5-Methoxy-UTP | CTP | ATP | GTP |
| 5-Methoxy-UTP | 5-Methyl-CTP | ATP | GTP |
| 75% 5-Methoxy-UTP + 25% UTP | 5-Methyl-CTP | ATP | GTP |
| 50% 5-Methoxy-UTP + 50% UTP | 5-Methyl-CTP | ATP | GTP |
| 25% 5-Methoxy-UTP + 75% UTP | 5-Methyl-CTP | ATP | GTP |
| 5-Methoxy-UTP | 75% 5-Methyl-CTP + 25% CTP | ATP | GTP |
| 5-Methoxy-UTP | 50% 5-Methyl-CTP + 50% CTP | ATP | GTP |
| 5-Methoxy-UTP | 25% 5-Methyl-CTP + 75% CTP | ATP | GTP |
| 75% 5-Methoxy-UTP + 25% UTP | 75% 5-Methyl-CTP + 25% CTP | ATP | GTP |
| 75% 5-Methoxy-UTP + 25% UTP | 50% 5-Methyl-CTP + 50% CTP | ATP | GTP |
| 75% 5-Methoxy-UTP + 25% UTP | 25% 5-Methyl-CTP + 75% CTP | ATP | GTP |
| 50% 5-Methoxy-UTP + 50% UTP | 75% 5-Methyl-CTP + 25% CTP | ATP | GTP |
| 50% 5-Methoxy-UTP + 50% UTP | 50% 5-Methyl-CTP + 50% CTP | ATP | GTP |
| 50% 5-Methoxy-UTP + 50% UTP | 25% 5-Methyl-CTP + 75% CTP | ATP | GTP |
| 25% 5-Methoxy-UTP + 75% UTP | 75% 5-Methyl-CTP + 25% CTP | ATP | GTP |
| 25% 5-Methoxy-UTP + 75% UTP | 50% 5-Methyl-CTP + 50% CTP | ATP | GTP |
| 25% 5-Methoxy-UTP + 75% UTP | 25% 5-Methyl-CTP + 75% CTP | ATP | GTP |
| 75% 5-Methoxy-UTP + 25% UTP | CTP | ATP | GTP |
| 50% 5-Methoxy-UTP + 50% UTP | CTP | ATP | GTP |
| 25% 5-Methoxy-UTP + 75% UTP | CTP | ATP | GTP |
| 5-Methoxy-UTP | CTP | ATP | GTP |
| 5-Methoxy-UTP | CTP | ATP | GTP |
| 5-Methoxy-UTP | CTP | ATP | GTP |
| 5-Methoxy-UTP | 5-Methyl-CTP | ATP | GTP |
| 5-Methoxy-UTP | 5-Methyl-CTP | ATP | GTP |
| 5-Methoxy-UTP | 5-Methyl-CTP | ATP | GTP |
| 5-Methoxy-UTP | CTP | Alpha-thio- | GTP |
| | | ATP | |
| 5-Methoxy-UTP | 5-Methyl-CTP | Alpha-thio- | GTP |
| | | ATP | |
| 5-Methoxy-UTP | CTP | ATP | Alpha- |
| | | | thio-GTP |
| 5-Methoxy-UTP | 5-Methyl-CTP | ATP | Alpha- |
| | | | thio-GTP |
| 5-Methoxy-UTP | CTP | N6—Me- | GTP |
| | | ATP | |
| 5-Methoxy-UTP | 5-Methyl-CTP | N6—Me- | GTP |
| | | ATP | |
| 5-Methoxy-UTP | CTP | ATP | GTP |
| 5-Methoxy-UTP | 5-Methyl-CTP | ATP | GTP |
| 75% 5-Methoxy-UTP + 25% UTP | 5-Methyl-CTP | ATP | GTP |
| 50% 5-Methoxy-UTP + 50% UTP | 5-Methyl-CTP | ATP | GTP |
| 25% 5-Methoxy-UTP + 75% UTP | 5-Methyl-CTP | ATP | GTP |
| 5-Methoxy-UTP | 75% 5-Methyl-CTP + 25% CTP | ATP | GTP |
| 5-Methoxy-UTP | 50% 5-Methyl-CTP + 50% CTP | ATP | GTP |
| 5-Methoxy-UTP | 25% 5-Methyl-CTP + 75% CTP | ATP | GTP |
| 75% 5-Methoxy-UTP + 25% UTP | 75% 5-Methyl-CTP + 25% CTP | ATP | GTP |
| 75% 5-Methoxy-UTP + 25% UTP | 50% 5-Methyl-CTP + 50% CTP | ATP | GTP |
| 75% 5-Methoxy-UTP + 25% UTP | 25% 5-Methyl-CTP + 75% CTP | ATP | GTP |
| 50% 5-Methoxy-UTP + 50% UTP | 75% 5-Methyl-CTP + 25% CTP | ATP | GTP |
| 50% 5-Methoxy-UTP + 50% UTP | 50% 5-Methyl-CTP + 50% CTP | ATP | GTP |
| 50% 5-Methoxy-UTP + 50% UTP | 25% 5-Methyl-CTP + 75% CTP | ATP | GTP |
| 25% 5-Methoxy-UTP + 75% UTP | 75% 5-Methyl-CTP + 25% CTP | ATP | GTP |
| 25% 5-Methoxy-UTP + 75% UTP | 50% 5-Methyl-CTP + 50% CTP | ATP | GTP |
| 25% 5-Methoxy-UTP + 75% UTP | 25% 5-Methyl-CTP + 75% CTP | ATP | GTP |
| 75% 5-Methoxy-UTP + 25% UTP | CTP | ATP | GTP |
| 50% 5-Methoxy-UTP + 50% UTP | CTP | ATP | GTP |
| 25% 5-Methoxy-UTP + 75% UTP | CTP | ATP | GTP |
| 5-Methoxy-UTP | 5-Ethyl-CTP | ATP | GTP |
| 5-Methoxy-UTP | 5-Methoxy-CTP | ATP | GTP |
| 5-Methoxy-UTP | 5-Ethynyl-CTP | ATP | GTP |
| 5-Methoxy-UTP | CTP | ATP | GTP |
| 5-Methoxy-UTP | 5-Methyl-CTP | ATP | GTP |
| 5-Methoxy-UTP | CTP | ATP | GTP |
| 5-Methoxy-UTP | 5-Methyl-CTP | ATP | GTP |
| 75% 5-Methoxy-UTP + 25% 1- | 5-Methyl-CTP | ATP | GTP |
| Methyl-pseudo-UTP | | | |
| 50% 5-Methoxy-UTP + 50% 1- | 5-Methyl-CTP | ATP | GTP |
| Methyl-pseudo-UTP | | | |
| 25% 5-Methoxy-UTP + 75% 1- | 5-Methyl-CTP | ATP | GTP |
| Methyl-pseudo-UTP | | | |
| 5-Methoxy-UTP | 75% 5-Methyl-CTP + 25% CTP | ATP | GTP |
| 5-Methoxy-UTP | 50% 5-Methyl-CTP + 50% CTP | ATP | GTP |
| 5-Methoxy-UTP | 25% 5-Methyl-CTP + 75% CTP | ATP | GTP |
| 75% 5-Methoxy-UTP + 25% 1- | 75% 5-Methyl-CTP + 25% CTP | ATP | GTP |
| Methyl-pseudo-UTP | | | |
| 75% 5-Methoxy-UTP + 25% 1- | 50% 5-Methyl-CTP + 50% CTP | ATP | GTP |
| Methyl-pseudo-UTP | | | |
| 75% 5-Methoxy-UTP + 25% 1- | 25% 5-Methyl-CTP + 75% CTP | ATP | GTP |
| Methyl-pseudo-UTP | | | |
| 50% 5-Methoxy-UTP + 50% 1- | 75% 5-Methyl-CTP + 25% CTP | ATP | GTP |
| Methyl-pseudo-UTP | | | |
| 50% 5-Methoxy-UTP + 50% 1- | 50% 5-Methyl-CTP + 50% CTP | ATP | GTP |
| Methyl-pseudo-UTP | | | |
| 50% 5-Methoxy-UTP + 50% 1- | 25% 5-Methyl-CTP + 75% CTP | ATP | GTP |
| Methyl-pseudo-UTP | | | |
| 25% 5-Methoxy-UTP + 75% 1- | 75% 5-Methyl-CTP + 25% CTP | ATP | GTP |
| Methyl-pseudo-UTP | | | |
| 25% 5-Methoxy-UTP + 75% 1- | 50% 5-Methyl-CTP + 50% CTP | ATP | GTP |
| Methyl-pseudo-UTP | | | |
| 25% 5-Methoxy-UTP + 75% 1- | 25% 5-Methyl-CTP + 75% CTP | ATP | GTP |
| Methyl-pseudo-UTP | | | |
| 75% 5-Methoxy-UTP + 25% 1- | CTP | ATP | GTP |
| Methyl-pseudo-UTP | | | |
| 50% 5-Methoxy-UTP + 50% 1- | CTP | ATP | GTP |
| Methyl-pseudo-UTP | | | |
| 25% 5-Methoxy-UTP + 75% 1- | CTP | ATP | GTP |
| Methyl-pseudo-UTP | | | |
| 5-methoxy-UTP | CTP | ATP | GTP |
| 5-methoxy-UTP | CTP | ATP | GTP |
| 5-methoxy-UTP | 5-Methyl-CTP | ATP | GTP |
| 5-Methoxy-UTP | CTP | ATP | GTP |
| 5-Methoxy-UTP | 5-Methyl-CTP | ATP | GTP |
| 75% 5-Methoxy-UTP + 25% UTP | 5-Methyl-CTP | ATP | GTP |
| 50% 5-Methoxy-UTP + 50% UTP | 5-Methyl-CTP | ATP | GTP |
| 25% 5-Methoxy-UTP + 75% UTP | 5-Methyl-CTP | ATP | GTP |
| 5-Methoxy-UTP | 75% 5-Methyl-CTP + 25% CTP | ATP | GTP |
| 5-Methoxy-UTP | 50% 5-Methyl-CTP + 50% CTP | ATP | GTP |
| 5-Methoxy-UTP | 25% 5-Methyl-CTP + 75% CTP | ATP | GTP |
| 75% 5-Methoxy-UTP + 25% UTP | 75% 5-Methyl-CTP + 25% CTP | ATP | GTP |
| 75% 5-Methoxy-UTP + 25% UTP | 50% 5-Methyl-CTP + 50% CTP | ATP | GTP |
| 75% 5-Methoxy-UTP + 25% UTP | 25% 5-Methyl-CTP + 75% CTP | ATP | GTP |
| 50% 5-Methoxy-UTP + 50% UTP | 75% 5-Methyl-CTP + 25% CTP | ATP | GTP |
| 50% 5-Methoxy-UTP + 50% UTP | 50% 5-Methyl-CTP + 50% CTP | ATP | GTP |
| 50% 5-Methoxy-UTP + 50% UTP | 25% 5-Methyl-CTP + 75% CTP | ATP | GTP |
| 25% 5-Methoxy-UTP + 75% UTP | 75% 5-Methyl-CTP + 25% CTP | ATP | GTP |
| 25% 5-Methoxy-UTP + 75% UTP | 50% 5-Methyl-CTP + 50% CTP | ATP | GTP |
| 25% 5-Methoxy-UTP + 75% UTP | 25% 5-Methyl-CTP + 75% CTP | ATP | GTP |
| 75% 5-Methoxy-UTP + 25% UTP | CTP | ATP | GTP |
| 50% 5-Methoxy-UTP + 50% UTP | CTP | ATP | GTP |
| 25% 5-Methoxy-UTP + 75% UTP | CTP | ATP | GTP |
| 5-Methoxy-UTP | CTP | ATP | GTP |
| 5-Methoxy-UTP | 5-Methyl-CTP | ATP | GTP |
| 75% 5-Methoxy-UTP + 25% UTP | 5-Methyl-CTP | ATP | GTP |
| 50% 5-Methoxy-UTP + 50% UTP | 5-Methyl-CTP | ATP | GTP |
| 25% 5-Methoxy-UTP + 75% UTP | 5-Methyl-CTP | ATP | GTP |
| 5-Methoxy-UTP | 75% 5-Methyl-CTP + 25% CTP | ATP | GTP |
| 5-Methoxy-UTP | 50% 5-Methyl-CTP + 50% CTP | ATP | GTP |
| 5-Methoxy-UTP | 25% 5-Methyl-CTP + 75% CTP | ATP | GTP |
| 75% 5-Methoxy-UTP + 25% UTP | 75% 5-Methyl-CTP + 25% CTP | ATP | GTP |
| 75% 5-Methoxy-UTP + 25% UTP | 50% 5-Methyl-CTP + 50% CTP | ATP | GTP |
| 75% 5-Methoxy-UTP + 25% UTP | 25% 5-Methyl-CTP + 75% CTP | ATP | GTP |
| 50% 5-Methoxy-UTP + 50% UTP | 75% 5-Methyl-CTP + 25% CTP | ATP | GTP |
| 50% 5-Methoxy-UTP + 50% UTP | 50% 5-Methyl-CTP + 50% CTP | ATP | GTP |
| 50% 5-Methoxy-UTP + 50% UTP | 25% 5-Methyl-CTP + 75% CTP | ATP | GTP |
| 25% 5-Methoxy-UTP + 75% UTP | 75% 5-Methyl-CTP + 25% CTP | ATP | GTP |
| 25% 5-Methoxy-UTP + 75% UTP | 50% 5-Methyl-CTP + 50% CTP | ATP | GTP |
| 25% 5-Methoxy-UTP + 75% UTP | 25% 5-Methyl-CTP + 75% CTP | ATP | GTP |
| 75% 5-Methoxy-UTP + 25% UTP | CTP | ATP | GTP |
| 50% 5-Methoxy-UTP + 50% UTP | CTP | ATP | GTP |
| 25% 5-Methoxy-UTP + 75% UTP | CTP | ATP | GTP |
| 5-Methoxy-UTP | CTP | ATP | GTP |
| 25% 5-Methoxy-UTP + 75% UTP | 75% 5-Methyl-CTP + 25% CTP | ATP | GTP |
| 25% 5-Methoxy-UTP + 75% UTP | 50% 5-Methyl-CTP + 50% CTP | ATP | GTP |
| 25% 5-Methoxy-UTP + 75% UTP | 25% 5-Methyl-CTP + 75% CTP | ATP | GTP |
| 75% 5-Methoxy-UTP + 25% UTP | 75% 5-Methyl-CTP + 25% CTP | ATP | GTP |
| 5-Methoxy-UTP | CTP | ATP | GTP |
| 25% 5-Methoxy-UTP + 75% UTP | 75% 5-Methyl-CTP + 25% CTP | ATP | GTP |
| 25% 5-Methoxy-UTP + 75% UTP | 50% 5-Methyl-CTP + 50% CTP | ATP | GTP |
| 25% 5-Methoxy-UTP + 75% UTP | 25% 5-Methyl-CTP + 75% CTP | ATP | GTP |
| 75% 5-Methoxy-UTP + 25% UTP | 75% 5-Methyl-CTP + 25% CTP | ATP | GTP |
| 5-Methoxy-UTP | CTP | ATP | GTP |
| 25% 5-Methoxy-UTP + 75% UTP | 75% 5-Methyl-CTP + 25% CTP | ATP | GTP |
| 25% 5-Methoxy-UTP + 75% UTP | 50% 5-Methyl-CTP + 50% CTP | ATP | GTP |
| 25% 5-Methoxy-UTP + 75% UTP | 25% 5-Methyl-CTP + 75% CTP | ATP | GTP |
| 75% 5-Methoxy-UTP + 25% UTP | 75% 5-Methyl-CTP + 25% CTP | ATP | GTP |
| 5-Methoxy-UTP | CTP | ATP | GTP |
| 25% 5-Methoxy-UTP + 75% UTP | 75% 5-Methyl-CTP + 25% CTP | ATP | GTP |
| 25% 5-Methoxy-UTP + 75% UTP | 50% 5-Methyl-CTP + 50% CTP | ATP | GTP |
| 25% 5-Methoxy-UTP + 75% UTP | 25% 5-Methyl-CTP + 75% CTP | ATP | GTP |
| 75% 5-Methoxy-UTP + 25% UTP | 75% 5-Methyl-CTP + 25% CTP | ATP | GTP |
| 5-Methoxy-UTP | CTP | ATP | GTP |
| 25% 5-Methoxy-UTP + 75% UTP | 75% 5-Methyl-CTP + 25% CTP | ATP | GTP |
| 25% 5-Methoxy-UTP + 75% UTP | 50% 5-Methyl-CTP + 50% CTP | ATP | GTP |
| 25% 5-Methoxy-UTP + 75% UTP | 25% 5-Methyl-CTP + 75% CTP | ATP | GTP |
| 75% 5-Methoxy-UTP + 25% UTP | 75% 5-Methyl-CTP + 25% CTP | ATP | GTP |
| 5-Methoxy-UTP | CTP | ATP | GTP |
| 25% 5-Methoxy-UTP + 75% UTP | 75% 5-Methyl-CTP + 25% CTP | ATP | GTP |
| 25% 5-Methoxy-UTP + 75% UTP | 50% 5-Methyl-CTP + 50% CTP | ATP | GTP |
| 25% 5-Methoxy-UTP + 75% UTP | 25% 5-Methyl-CTP + 75% CTP | ATP | GTP |
| 75% 5-Methoxy-UTP + 25% UTP | 75% 5-Methyl-CTP + 25% CTP | ATP | GTP |
| 5-Methoxy-UTP | CTP | ATP | GTP |
| 25% 5-Methoxy-UTP + 75% UTP | 75% 5-Methyl-CTP + 25% CTP | ATP | GTP |
| 25% 5-Methoxy-UTP + 75% UTP | 50% 5-Methyl-CTP + 50% CTP | ATP | GTP |
| 25% 5-Methoxy-UTP + 75% UTP | 25% 5-Methyl-CTP + 75% CTP | ATP | GTP |
| 75% 5-Methoxy-UTP + 25% UTP | 75% 5-Methyl-CTP + 25% CTP | ATP | GTP |
| 5-Methoxy-UTP | 5-Fluoro-CTP | ATP | GTP |
| 5-Methoxy-UTP | 5-Phenyl-CTP | ATP | GTP |
| 5-Methoxy-UTP | N4—Bz-CTP | ATP | GTP |
| 5-Methoxy-UTP | CTP | N6- | GTP |
| | | Isopentenyl- | |
| | | ATP | |
| 5-Methoxy-UTP | N4—Ac-CTP | ATP | GTP |
| 25% 5-Methoxy-UTP + 75% UTP | 25% N4—Ac-CTP + 75% CTP | ATP | GTP |
| 25% 5-Methoxy-UTP + 75% UTP | 75% N4—Ac-CTP + 25% CTP | ATP | GTP |
| 75% 5-Methoxy-UTP + 25% UTP | 25% N4—Ac-CTP + 75% CTP | ATP | GTP |
| 75% 5-Methoxy-UTP + 25% UTP | 75% N4—Ac-CTP + 25% CTP | ATP | GTP |
| 5-Methoxy-UTP | 5-Hydroxymethyl-CTP | ATP | GTP |
| 25% 5-Methoxy-UTP + 75% UTP | 25% 5-Hydroxymethyl-CTP + 75% | ATP | GTP |
| | CTP | | |
| 25% 5-Methoxy-UTP + 75% UTP | 75% 5-Hydroxymethyl-CTP + 25% | ATP | GTP |
| | CTP | | |
| 75% 5-Methoxy-UTP + 25% UTP | 25% 5-Hydroxymethyl-CTP + 75% | ATP | GTP |
| | CTP | | |
| 75% 5-Methoxy-UTP + 25% UTP | 75% 5-Hydroxymethyl-CTP + 25% | ATP | GTP |
| | CTP | | |
| 5-Methoxy-UTP | N4-Methyl CTP | ATP | GTP |
| 25% 5-Methoxy-UTP + 75% UTP | 25% N4-Methyl CTP + 75% CTP | ATP | GTP |
| 25% 5-Methoxy-UTP + 75% UTP | 75% N4-Methyl CTP + 25% CTP | ATP | GTP |
| 75% 5-Methoxy-UTP + 25% UTP | 25% N4-Methyl CTP + 75% CTP | ATP | GTP |
| 75% 5-Methoxy-UTP + 25% UTP | 75% N4-Methyl CTP + 25% CTP | ATP | GTP |
| 5-Methoxy-UTP | 5-Trifluoromethyl-CTP | ATP | GTP |
| 25% 5-Methoxy-UTP + 75% UTP | 25% 5-Trifluoromethyl-CTP + 75% | ATP | GTP |
| | CTP | | |
| 25% 5-Methoxy-UTP + 75% UTP | 75% 5-Trifluoromethyl-CTP + 25% | ATP | GTP |
| | CTP | | |
| 75% 5-Methoxy-UTP + 25% UTP | 25% 5-Trifluoromethyl-CTP + 75% | ATP | GTP |
| | CTP | | |
| 75% 5-Methoxy-UTP + 25% UTP | 75% 5-Trifluoromethyl-CTP + 25% | ATP | GTP |
| | CTP | | |
| 5-Methoxy-UTP | 5-Bromo-CTP | ATP | GTP |
| 25% 5-Methoxy-UTP + 75% UTP | 25% 5-Bromo-CTP + 75% CTP | ATP | GTP |
| 25% 5-Methoxy-UTP + 75% UTP | 75% 5-Bromo-CTP + 25% CTP | ATP | GTP |
| 75% 5-Methoxy-UTP + 25% UTP | 25% 5-Bromo-CTP + 75% CTP | ATP | GTP |
| 75% 5-Methoxy-UTP + 25% UTP | 75% 5-Bromo-CTP + 25% CTP | ATP | GTP |
| 5-Methoxy-UTP | 5-Iodo-CTP | ATP | GTP |
| 25% 5-Methoxy-UTP + 75% UTP | 25% 5-Iodo-CTP + 75% CTP | ATP | GTP |
| 25% 5-Methoxy-UTP + 75% UTP | 75% 5-Iodo-CTP + 25% CTP | ATP | GTP |
| 75% 5-Methoxy-UTP + 25% UTP | 25% 5-Iodo-CTP + 75% CTP | ATP | GTP |
| 75% 5-Methoxy-UTP + 25% UTP | 75% 5-Iodo-CTP + 25% CTP | ATP | GTP |
| 5-Methoxy-UTP | 5-Ethyl-CTP | ATP | GTP |
| 25% 5-Methoxy-UTP + 75% UTP | 25% 5-Ethyl-CTP + 75% CTP | ATP | GTP |
| 25% 5-Methoxy-UTP + 75% UTP | 75% 5-Ethyl-CTP + 25% CTP | ATP | GTP |
| 75% 5-Methoxy-UTP + 25% UTP | 25% 5-Ethyl-CTP + 75% CTP | ATP | GTP |
| 75% 5-Methoxy-UTP + 25% UTP | 75% 5-Ethyl-CTP + 25% CTP | ATP | GTP |
| 5-Methoxy-UTP | 5-Methoxy-CTP | ATP | GTP |
| 25% 5-Methoxy-UTP + 75% UTP | 25% 5-Methoxy-CTP + 75% CTP | ATP | GTP |
| 25% 5-Methoxy-UTP + 75% UTP | 75% 5-Methoxy-CTP + 25% CTP | ATP | GTP |
| 75% 5-Methoxy-UTP + 25% UTP | 25% 5-Methoxy-CTP + 75% CTP | ATP | GTP |
| 75% 5-Methoxy-UTP + 25% UTP | 75% 5-Methoxy-CTP + 25% CTP | ATP | GTP |
| 5-Methoxy-UTP | 5-Ethynyl-CTP | ATP | GTP |
| 25% 5-Methoxy-UTP + 75% UTP | 25% 5-Ethynyl-CTP + 75% CTP | ATP | GTP |
| 25% 5-Methoxy-UTP + 75% UTP | 75% 5-Ethynyl-CTP + 25% CTP | ATP | GTP |
| 75% 5-Methoxy-UTP + 25% UTP | 25% 5-Ethynyl-CTP + 75% CTP | ATP | GTP |
| 75% 5-Methoxy-UTP + 25% UTP | 75% 5-Ethynyl-CTP + 25% CTP | ATP | GTP |
| 5-Methoxy-UTP | 5-Pseudo-iso-CTP | ATP | GTP |
| 25% 5-Methoxy-UTP + 75% UTP | 25% 5-Pseudo-iso-CTP + 75% CTP | ATP | GTP |
| 25% 5-Methoxy-UTP + 75% UTP | 75% 5-Pseudo-iso-CTP + 25% CTP | ATP | GTP |
| 75% 5-Methoxy-UTP + 25% UTP | 25% 5-Pseudo-iso-CTP + 75% CTP | ATP | GTP |
| 75% 5-Methoxy-UTP + 25% UTP | 75% 5-Pseudo-iso-CTP + 25% CTP | ATP | GTP |
| 5-Methoxy-UTP | 5-Formyl-CTP | ATP | GTP |
| 25% 5-Methoxy-UTP + 75% UTP | 25% 5-Formyl-CTP + 75% CTP | ATP | GTP |
| 25% 5-Methoxy-UTP + 75% UTP | 75% 5-Formyl-CTP + 25% CTP | ATP | GTP |
| 75% 5-Methoxy-UTP + 25% UTP | 25% 5-Formyl-CTP + 75% CTP | ATP | GTP |
| 75% 5-Methoxy-UTP + 25% UTP | 75% 5-Formyl-CTP + 25% CTP | ATP | GTP |
| 5-Methoxy-UTP | 5-Aminoallyl-CTP | ATP | GTP |
| 25% 5-Methoxy-UTP + 75% UTP | 25% 5-Aminoallyl-CTP + 75% CTP | ATP | GTP |
| 25% 5-Methoxy-UTP + 75% UTP | 75% 5-Aminoallyl-CTP + 25% CTP | ATP | GTP |
| 75% 5-Methoxy-UTP + 25% UTP | 25% 5-Aminoallyl-CTP + 75% CTP | ATP | GTP |
| 75% 5-Methoxy-UTP + 25% UTP | 75% 5-Aminoallyl-CTP + 25% CTP | ATP | GTP |

### III. Polynucleotide Architecture

[0396] Traditionally, the basic components of an mRNA molecule include at least a coding region, a 5′UTR, a 3′UTR, a 5′ cap and a poly-A tail. The polynucleotides of the present disclosure can function as mRNA but are distinguished from wild-type mRNA in their functional and/or structural design features that serve, e.g., to overcome existing problems of effective polypeptide production using nucleic-acid based therapeutics.

### In Vitro Transcribed Polynucleotides

[0397] The disclosure also includes an in vitro transcribed polynucleotide comprising the polynucleotide described herein, i.e., a polynucleotide comprising an ORF encoding an MCM polypeptide.

[0398] Polynucleotides which are made using only in vitro transcription (IVT) enzymatic synthesis methods are referred to as “IVT polynucleotides.” Methods of making IVT polynucleotides are known in the art and are described, e.g., in International Publication Nos. WO2013151666, WO2013151667, WO2013151668, WO2013151663, WO2013151669, WO2013151670, WO2013151664, WO2013151665, WO2013151671, WO2013151672 and WO2013151736; the contents of each of which are herein incorporated by reference in their entireties.

[0399] The shortest length of the first region of the primary construct of the IVT polynucleotide can be the length of a nucleic acid sequence that is sufficient to encode for MCM, a fragment thereof, or variant thereof. The length of the first region of the primary construct of the IVT polynucleotide encoding the polypeptide of interest can be greater than about 30 nucleotides in length (e.g., at least or greater than about 2,154, 2,250, 2,500, and 3,000, 4,000, 4,100, 4,200, 4,300, 4,400, 4,500, 4,600, 4,700, 4,800, 4,900, 5,000, 5,100, 5,200, 5,300, 5,400, 5,500, 6,000, 7,000, 8,000, 9,000, 10,000, 20,000, 30,000, 40,000, 50,000, 60,000, 70,000, 80,000, 90,000 or up to and including 100,000 nucleotides).

[0400] In some embodiments, the first and second flanking regions of the IVT polynucleotide can range independently from 15-1,000 nucleotides in length (e.g., greater than 30, 40, 45, 50, 55, 60, 70, 80, 90, 100, 120, 140, 160, 180, 200, 250, 300, 350, 400, 450, 500, 600, 700, 800, 900, 1,000, 1,500, 2,000, 2,500, 3,000, 3,500, 4,000, 4,500, 5,000, 5,500 nucleotides or at least 30, 40, 45, 50, 55, 60, 70, 80, 90, 100, 120, 140, 160, 180, 200, 250, 300, 350, 400, 450, 500, 600, 700, 800, 900, 1,000, 1,500, 2,000, 2,500, 3,000, 3,500, 4,000, 4,500, 5,000, 5,500 nucleotides).

[0401] In some embodiments, the tailing sequence of the IVT polynucleotide can range from absent to 500 nucleotides in length (e.g., at least 60, 70, 80, 90, 120, 140, 160, 180, 200, 250, 300, 350, 400, 450, or 500 nucleotides). Where the tailing region is a polyA tail, the length can be determined in units of or as a function of polyA Binding Protein binding. In this embodiment, the polyA tail is long enough to bind at least 4 monomers of PolyA Binding Protein. PolyA Binding Protein monomers bind to stretches of approximately 38 nucleotides. As such, it has been observed that polyA tails of about 80 nucleotides and 160 nucleotides are functional.

[0402] In some embodiments, the capping region of the IVT polynucleotide can comprise a single cap or a series of nucleotides forming the cap. In this embodiment the capping region can be from 1 to 10, e.g., 2-9, 3-8, 4-7, 1-5, 5-10, or at least 2, or 10 or fewer nucleotides in length. In some embodiments, the cap is absent.

[0403] In some embodiments, the first and second operational regions of the IVT polynucleotide can range from 3 to 40, e.g., 5-30, 10-20, 15, or at least 4, or 30 or fewer nucleotides in length and can comprise, in addition to a Start and/or Stop codon, one or more signal and/or restriction sequences.

[0404] In some embodiments, the IVT polynucleotides can be structurally modified or chemically modified. When the IVT polynucleotides are chemically and/or structurally modified, the polynucleotides can be referred to as “modified IVT polynucleotides.”

[0405] In some embodiments, if the IVT polynucleotides are chemically modified they can have a uniform chemical modification of all or any of the same nucleoside type or a population of modifications produced by mere downward titration of the same starting modification in all or any of the same nucleoside type, or a measured percent of a chemical modification of all any of the same nucleoside type but with random incorporation, such as where all uridines are replaced by a uridine analog, e.g., pseudouridine or 5-methoxyuridine. In another embodiment, the IVT polynucleotides can have a uniform chemical modification of two, three, or four of the same nucleoside type throughout the entire polynucleotide (such as all uridines and all cytosines, etc. are modified in the same way).

[0406] In some embodiments, the IVT polynucleotide can encode MCM and at least one additional peptide or polypeptide of interest. In another embodiment, the IVT polynucleotide can encode MCM and two or more peptides or polypeptides of interest. Non-limiting examples of peptides or polypeptides of interest include an enzyme and its substrate, a label and its binding molecule, a second messenger and its enzyme or the components of multimeric proteins or complexes.

[0407] In some embodiments, the IVT polynucleotide encodes an MCM protein or a functional fragment thereof. In some embodiments, the IVT polynucleotides of the disclosure comprise any one of the human MCM nucleic acid sequences selected from SEQ ID NOs: 1 to 207, 732 to 765, and 772. In some embodiments, the IVT polynucleotide encodes a human MCM or functional fragment thereof comprising at least one amino acid mutation from the wild type sequence. In some embodiments, the IVT polynucleotide encodes an MCM mutant comprising one or more of the point mutations V69, T499, H532, A598, and V671. In some embodiments, the expression of the encoded polypeptide is increased. In some embodiments, the IVT polynucleotide increases MCM expression levels in cells when introduced into those cells, e.g., by 20-50%, at least 20%, at least 25%, at least 30%, at least 35%, at least 40%, at least 45%, or at least 50%.

### Chimeric Polynucleotide Architecture

[0408] The disclosure also includes a chimeric polynucleotide comprising the polynucleotide described herein, i.e., a polynucleotide comprising an ORF encoding an MCM polypeptide.

[0409] Polynucleotides which have portions or regions which differ in size and/or chemical modification pattern, chemical modification position, chemical modification percent or chemical modification population and combinations of the foregoing are known as “chimeric polynucleotides.” A “chimera” according to the present disclosure is an entity having two or more incongruous or heterogeneous parts or regions. As used herein a “part” or “region” of a polynucleotide is defined as any portion of the polynucleotide which is less than the entire length of the polynucleotide. Chimeric polynucleotides which are modified mRNA molecules are termed “chimeric modified mRNA” or “chimeric mRNA.”

[0410] Chimeric polynucleotides have portions or regions that differ in size and/or chemical modification pattern, chemical modification position, chemical modification percent or chemical modification population and combinations of the foregoing.

[0411] Examples of parts or regions, where the chimeric polynucleotide functions as an mRNA and encodes a polypeptide of interest include, but are not limited to, untranslated regions (UTRs, such as the 5′ UTR or 3′ UTR), coding regions, cap regions, polyA tail regions, start regions, stop regions, signal or target sequence regions, and combinations thereof.

[0412] In some embodiments, the chimeric polynucleotides of the disclosure have a structure comprising Formula I.

5′[Aₙ]ₓ-L1-[B₀]_{y}-L2-[Cₚ]_{z}-L3 3′ Formula I

wherein:
each of A and B independently comprise a region of linked nucleosides;
either A or B or both A and B encode MCM as described elsewhere herein;
C is an optional region of linked nucleosides;
at least one of regions A, B, or C is positionally modified, wherein said positionally modified region comprises at least two chemically modified nucleosides of one or more of the same nucleoside type of adenosine, thymidine, guanosine, cytidine, or uridine, and wherein at least two of the chemical modifications of nucleosides of the same type are different chemical modifications;
n, o and p are independently an integer between 15-10,000, representing the number of nucleosides in regions A, B, and C, respectively;
x and y are independently 1-20;
z is 0-5;
L1 and L2 are independently optional linker moieties, said linker moieties being either nucleic acid based or non-nucleic acid based; and
L3 is an optional conjugate or an optional linker moiety, said linker moiety being either nucleic acid based or non-nucleic acid based.

[0413] In some embodiments, at least one of the regions of linked nucleosides of A can comprise a sequence of linked nucleosides that can function as a 5′ untranslated region (UTR). The sequence of linked nucleosides can be a natural or synthetic 5′ UTR. As a non-limiting example, the chimeric polynucleotide can encode MCM and the sequence of linked nucleosides of A can encode the native 5′ UTR of the MCM protein or a non-heterologous 5′ UTR such as, but not limited to a synthetic UTR.

[0414] In another embodiment, at least one of the regions of linked nucleosides of A can be a cap region. The cap region can be located 5′ to a region of linked nucleosides of A functioning as a 5′UTR. The cap region can comprise at least one cap such as, but not limited to, Cap0, Cap1, ARCA, inosine, N1-methyl-guanosine, 2′fluoro-guanosine, 7-deaza-guanosine, 8-oxo-guanosine, 2-amino-guanosine, LNA-guanosine, 2-azido-guanosine, Cap2 and Cap4.

[0415] In some embodiments, the polynucleotide of the disclosure comprises a Cap1 5′UTR. In some embodiments, a polynucleotide comprises the Cap1 5′UTR, wherein the polynucleotide encodes human MCM or functional fragment thereof. In some embodiments, a polynucleotide comprising 5′UTR sequence, e.g., Cap1, for encoding an MCM protein as disclosed herein increases expression of MCM compared to polynucleotides encoding MCM comprising a different 5′UTR (e.g., Cap0, ARCA, inosine, N1-methyl-guanosine, 2′fluoro-guanosine, 7-deaza-guanosine, 8-oxo-guanosine, 2-amino-guanosine, LNA-guanosine, 2-azido-guanosine, Cap2 or Cap4). In some embodiments, polynucleotide comprising the Cap1 5′UTR, increases MCM expression levels in cells when introduced into those cells, e.g., by at least 20%, e.g., at least 20%, at least 25%, at least 35%, or at least 40%.

[0416] In some embodiments, at least one of the regions of linked nucleosides of C can comprise a sequence of linked nucleosides that can function as a 3′ UTR. The sequence of linked nucleosides can be a natural or synthetic 3′ UTR. As a non-limiting example, the chimeric polynucleotide can encode MCM and the sequence of linked nucleosides of C can encode the native 3′ UTR of MCM or a non-heterologous 3′ UTR such as, but not limited to a synthetic UTR.

[0417] In some embodiments, at least one of the regions of linked nucleosides of A comprises a sequence of linked nucleosides that functions as a 5′ UTR and at least one of the regions of linked nucleosides of C comprises a sequence of linked nucleosides that functions as a 3′ UTR. In some embodiments, the 5′ UTR and the 3′ UTR can be from the same or different species. In another embodiment, the 5′ UTR and the 3′ UTR can encode the native untranslated regions from different proteins from the same or different species.

[0418] Chimeric polynucleotides, including the parts or regions thereof, of the present disclosure can be classified as hemimers, gapmers, wingmers, or blockmers.

[0419] As used herein, a “hemimer” is a chimeric polynucleotide comprising a region or part that comprises half of one pattern, percent, position or population of a chemical modification(s) and half of a second pattern, percent, position or population of a chemical modification(s). Chimeric polynucleotides of the present disclosure can also comprise hemimer subregions. In some embodiments, a part or region is 50% of one and 50% of another.

[0420] In some embodiments, the entire chimeric polynucleotide can be 50% of one and 50% of the other. Any region or part of any chimeric polynucleotide of the disclosure can be a hemimer. Types of hemimers include pattern hemimers, population hemimers or position hemimers. By definition, hemimers are 50:50 percent hemimers.

[0421] As used herein, a “gapmer” is a chimeric polynucleotide having at least three parts or regions with a gap between the parts or regions. The “gap” can comprise a region of linked nucleosides or a single nucleoside that differs from the chimeric nature of the two parts or regions flanking it. The two parts or regions of a gapmer can be the same or different from each other.

[0422] As used herein, a “wingmer” is a chimeric polynucleotide having at least three parts or regions with a gap between the parts or regions. Unlike a gapmer, the two flanking parts or regions surrounding the gap in a wingmer are the same in degree or kind. Such similarity can be in the length of number of units of different modifications or in the number of modifications. The wings of a wingmer can be longer or shorter than the gap. The wing parts or regions can be 20, 30, 40, 50, 60 70, 80, 90 or 95% greater or shorter in length than the region that comprises the gap.

[0423] As used herein, a “blockmer” is a patterned polynucleotide where parts or regions are of equivalent size or number and type of modifications. Regions or subregions in a blockmer can be 50, 51, 52, 53, 54, 55, 56, 57, 58, 59, 60, 61 62, 63, 64, 65, 66, 67, 68, 69, 70, 71, 72, 73, 74, 75, 76, 77, 78, 79, 80, 81, 82, 83, 84, 85, 86, 87, 88, 89, 90, 91, 92, 93, 94, 95, 96, 97, 98, 99, 100, 101, 102, 103, 104, 105, 106, 107, 108, 109, 110, 111, 112, 113, 114, 115, 116, 117, 118, 119, 120, 121, 122, 123, 124, 125, 126, 127, 128, 129, 130, 131, 132, 133, 134, 135, 136, 137, 138, 139, 140, 141, 142, 143, 144, 145, 146, 147, 148, 149, 150, 151, 152, 153, 154, 155, 156, 157, 158, 159, 160, 161, 162, 163, 164, 165, 166, 167, 168, 169, 170, 171, 172, 173, 174, 175, 176, 177, 178, 179, 180, 181, 182, 183, 184, 185, 186, 187, 188, 189, 190, 191, 192, 193, 194, 195, 196, 197, 198, 199, 200, 201, 202, 203, 204, 205, 206, 207, 208, 209, 210, 211, 212, 213, 214, 215, 216, 217, 218, 219, 220, 221, 222, 223, 224, 225, 226, 227, 228, 229, 230, 231, 232, 233, 234, 235, 236, 237, 238, 239, 240, 241, 242, 243, 244, 245, 246, 247, 248, 249, 250, 251, 252, 253, 254, 255, 256, 257, 258, 259, 260, 261, 262, 263, 264, 265, 266, 267, 268, 269, 270, 271, 272, 273, 274, 275, 276, 277, 278, 279, 280, 281, 282, 283, 284, 285, 286, 287, 288, 289, 290, 291, 292, 293, 294, 295, 296, 297, 298, 299, 300, 310, 320, 330, 340, 350, 360, 370, 380, 390, 400, 410, 420, 430, 440, 450, 460, 470, 480, 490 or 500, nucleosides long.

[0424] Chimeric polynucleotides, including the parts or regions thereof, of the present disclosure having a chemical modification pattern are referred to as “pattern chimeras.” Pattern chimeras can also be referred to as blockmers. Pattern chimeras are those polynucleotides having a pattern of modifications within, across or among regions or parts.

[0425] Patterns of modifications within a part or region are those that start and stop within a defined region. Patterns of modifications across a part or region are those patterns that start in on part or region and end in another adjacent part or region. Patterns of modifications among parts or regions are those that begin and end in one part or region and are repeated in a different part or region, which is not necessarily adjacent to the first region or part.

[0426] The regions or subregions of pattern chimeras or blockmers can have simple alternating patterns such as ABAB[AB]n where each “A” and each “B” represent different chemical modifications (at least one of the base, sugar or backbone linker), different types of chemical modifications (e.g., naturally occurring and non-naturally occurring), different percentages of modifications or different populations of modifications. The pattern can repeat n number of times where n=3-300. Further, each A or B can represent from 1-2500 units (e.g., nucleosides) in the pattern. Patterns can also be alternating multiples such as AABBAABB[AABB]n (an alternating double multiple) or AAABBBAAABBB[AAABBB]n (an alternating triple multiple) pattern. The pattern can repeat n number of times where n=3-300.

[0427] Different patterns can also be mixed together to form a second order pattern. For example, a single alternating pattern can be combined with a triple alternating pattern to form a second order alternating pattern A‘B’. One example would be [ABABAB][AAABBBAAABBB][ABABAB][AAABBBAAABBB] [ABABAB][AAABBBAAABBB], where [ABABAB] is A′ and [AAABBBAAABBB] is B′. In like fashion, these patterns can be repeated n number of times, where n=3-300.

[0428] Patterns can include three or more different modifications to form an ABCABC[ABC]n pattern. These three component patterns can also be multiples, such as AABBCCAABBCC[AABBCC]n and can be designed as combinations with other patterns such as ABCABCAABBCCABCABCAABBCC, and can be higher order patterns.

[0429] Regions or subregions of position, percent, and population modifications need not reflect an equal contribution from each modification type. They can form series such as “1-2-3-4,” “1-2-4-8,” where each integer represents the number of units of a particular modification type. Alternatively, they can be odd only, such as ‘1-3-3-1-3-1-5” or even only “2-4-2-4-6-4-8” or a mixture of both odd and even number of units such as “1-3-4-2-5-7-3-3-4”.

[0430] Pattern chimeras can vary in their chemical modification by degree (such as those described above) or by kind (e.g., different modifications).

[0431] Chimeric polynucleotides, including the parts or regions thereof, of the present disclosure having at least one region with two or more different chemical modifications of two or more nucleoside members of the same nucleoside type (A, C, G, T, or U) are referred to as “positionally modified” chimeras. Positionally modified chimeras are also referred to herein as “selective placement” chimeras or “selective placement polynucleotides”. As the name implies, selective placement refers to the design of polynucleotides that, unlike polynucleotides in the art where the modification to any A, C, G, T or U is the same by virtue of the method of synthesis, can have different modifications to the individual As, Cs, Gs, Ts or Us in a polynucleotide or region thereof. For example, in a positionally modified chimeric polynucleotide, there can be two or more different chemical modifications to any of the nucleoside types of As, Cs, Gs, Ts, or Us. There can also be combinations of two or more to any two or more of the same nucleoside type. For example, a positionally modified or selective placement chimeric polynucleotide can comprise 3 different modifications to the population of adenines in the molecule and also have 3 different modifications to the population of cytosines in the construct-all of which can have a unique, non-random, placement.

[0432] Chimeric polynucleotides, including the parts or regions thereof, of the present disclosure having a chemical modification percent are referred to as “percent chimeras.” Percent chimeras can have regions or parts that comprise at least 1%, at least 2%, at least 5%, at least 8%, at least 10%, at least 20%, at least 30%, at least 40%, at least 50%, at least 60%, at least 70%, at least 80%, at least 90%, at least 95%, or at least 99% positional, pattern or population of modifications. Alternatively, the percent chimera can be completely modified as to modification position, pattern, or population. The percent of modification of a percent chimera can be split between naturally occurring and non-naturally occurring modifications.

[0433] Chimeric polynucleotides, including the parts or regions thereof, of the present disclosure having a chemical modification population are referred to as “population chimeras.” A population chimera can comprise a region or part where nucleosides (their base, sugar or backbone linkage, or combination thereof) have a select population of modifications. Such modifications can be selected from functional populations such as modifications that induce, alter or modulate a phenotypic outcome. For example, a functional population can be a population or selection of chemical modifications that increase the level of a cytokine. Other functional populations can individually or collectively function to decrease the level of one or more cytokines. Use of a selection of these like-function modifications in a chimeric polynucleotide would therefore constitute a “functional population chimera.” As used herein, a “functional population chimera” can be one whose unique functional feature is defined by the population of modifications as described above or the term can apply to the overall function of the chimeric polynucleotide itself. For example, as a whole the chimeric polynucleotide can function in a different or superior way as compared to an unmodified or non-chimeric polynucleotide.

[0434] It should be noted that polynucleotides that have a uniform chemical modification of all of any of the same nucleoside type or a population of modifications produced by mere downward titration of the same starting modification in all of any of the same nucleoside type, or a measured percent of a chemical modification of all any of the same nucleoside type but with random incorporation, such as where all uridines are replaced by a uridine analog, e.g., pseudouridine or 5-methoxyuridine, are not considered chimeric polynucleotides. Likewise, polynucleotides having a uniform chemical modification of two, three, or four of the same nucleoside type throughout the entire polynucleotide (such as all uridines and all cytosines, etc. are modified in the same way) are not considered chimeric polynucleotides. One example of a polynucleotide that is not chimeric is the canonical pseudouridine/5-methyl cytosine modified polynucleotide. These uniform polynucleotides are arrived at entirely via in vitro transcription (IVT) enzymatic synthesis; and due to the limitations of the synthesizing enzymes, they contain only one kind of modification at the occurrence of each of the same nucleoside type, i.e., adenosine (A), thymidine (T), guanosine (G), cytidine (C) or uridine (U), found in the polynucleotide. Such polynucleotides can be characterized as IVT polynucleotides.

[0435] The chimeric polynucleotides of the present disclosure can be structurally modified or chemically modified. When the chimeric polynucleotides of the present disclosure are chemically and/or structurally modified, the polynucleotides can be referred to as “modified chimeric polynucleotides.”

[0436] In some embodiments, the chimeric polynucleotides can encode two or more peptides or polypeptides of interest. Such peptides or polypeptides of interest include an enzyme and its substrate, a label and its binding molecule, a second messenger and its enzyme, or the components of multimeric proteins or complexes.

[0437] The regions or parts of the chimeric polynucleotides can be separated by a linker or spacer moiety. Such linkers or spaces can be nucleic acid based or non-nucleosidic.

[0438] In some embodiments, the chimeric polynucleotides can include a sequence encoding a self-cleaving peptide described herein, such as, but not limited to, a 2 A peptide. The polynucleotide sequence of the 2 A peptide in the chimeric polynucleotide can be modified or sequence-optimized by the methods described herein and/or are known in the art.

[0439] Notwithstanding the foregoing, the chimeric polynucleotides of the present disclosure can comprise a region or part that is not positionally modified or not chimeric as defined herein. For example, a region or part of a chimeric polynucleotide can be uniformly modified at one or more A, T, C, G, or U, but the polynucleotides will not be uniformly modified throughout the entire region or part.

[0440] Regions or parts of chimeric polynucleotides can be, in some embodiments, from 15-10,000 nucleosides in length and, in some embodiments, a polynucleotide can have from 2-100 different regions or patterns of regions as described herein.

[0441] In some embodiments, chimeric polynucleotides encode one or more polypeptides of interest. In another embodiment, the chimeric polynucleotides are substantially non-coding. In another embodiment, the chimeric polynucleotides have both coding and non-coding regions and parts.

[0442] In some embodiments, regions or subregions of the polynucleotides can range from being absent to 500 nucleotides in length (e.g., at least 60, 70, 80, 90, 100, 110, 120, 130, 140, 150, 160, 170, 180, 190, 200, 250, 300, 350, 400, 450, or 500 nucleotides). Where the region is a polyA tail, the length can be determined in units of, or as a function of, polyA Binding Protein binding. In this embodiment, the polyA tail is long enough to bind at least 4 monomers of PolyA Binding Protein. PolyA Binding Protein monomers bind to stretches of approximately 38 nucleotides. As such, it has been observed that polyA tails of about 80 nucleotides to about 160 nucleotides are functional. The chimeric polynucleotides of the present disclosure that function as an mRNA need not comprise a polyA tail.

[0443] In some embodiments of the present disclosure, chimeric polynucleotides that function as an mRNA have a capping region. The capping region can comprise a single cap or a series of nucleotides forming the cap. In this embodiment the capping region can be from 1 to 10, e.g., 2-9, 3-8, 4-7, 1-5, 5-10, or at least 2, or 10 or fewer nucleotides in length. In some embodiments, the cap is absent.

[0444] The present disclosure contemplates chimeric polynucleotides that are circular or cyclic. As the name implies circular polynucleotides are circular in nature meaning that the termini are joined in some fashion, whether by ligation, covalent bond, common association with the same protein or other molecule or complex or by hybridization.

[0445] Chimeric polynucleotides, formulations and compositions comprising chimeric polynucleotides, and methods of making, using and administering chimeric polynucleotides are also described in International Patent Application No. PCT/US2014/53907, the contents of which is incorporated by reference in its entirety.

[0446] In some embodiments, the chimeric polynucleotide encodes an MCM protein or a functional fragment thereof. In some embodiments, the chimeric polynucleotides of the disclosure comprise any one of the human MCM nucleic acid sequences selected from SEQ ID NOs: 1-207, 732-765, and 772. In some embodiments, the chimeric polynucleotide encodes a human MCM or functional fragment thereof comprising at least one amino acid mutation from the wild type sequence. In some embodiments, the chimeric polynucleotide encodes an MCM mutant comprising one or more of the point mutations V69, T499, H532, A598, and V671. In some embodiments, the expression of the encoded polypeptide is increased. In some embodiments, the chimeric polynucleotide increases MCM expression levels in cells when introduced into those cells, e.g., by 20-50%, at least 20%, at least 25%, at least 30%, at least 35%, at least 40%, at least 45%, or at least 50%.

### Circular Polynucleotide Architecture

[0447] The disclosure also includes a circular polynucleotide comprising the polynucleotide described herein, i.e., a polynucleotide comprising an ORF encoding an MCM polypeptide.

[0448] Polynucleotides that are circular are known as “circular polynucleotides” or “circP.” As used herein, “circular polynucleotides” or “circP” means a single stranded circular polynucleotide which acts substantially like, and has the properties of, an RNA. The term “circular” is also meant to encompass any secondary or tertiary configuration of the circP.

[0449] The present disclosure contemplates polynucleotides encoding MCM that are circular or cyclic. As the name implies circular polynucleotides are circular in nature meaning that the termini are joined in some fashion, whether by ligation, covalent bond, common association with the same protein or other molecule or complex or by hybridization.

[0450] The circular polynucleotides or circPs that encode at least one peptide or polypeptide of interest are known as circular RNAs or circRNA. As used herein, “circular RNA” or “circRNA” means a circular polynucleotide that can encode at least one peptide or polypeptide of interest.

[0451] The circPs that comprise at least one sensor sequence and do not encode a peptide or polypeptide of interest are known as circular sponges or circSP. As used herein, “circular sponges,” “circular polynucleotide sponges” or “circSP” means a circular polynucleotide that comprises at least one sensor sequence and does not encode a polypeptide of interest.

[0452] As used herein, “sensor sequence” means a receptor or pseudo-receptor for endogenous nucleic acid binding molecules. Non-limiting examples of sensor sequences include, microRNA binding sites, microRNA seed sequences, microRNA binding sites without the seed sequence, transcription factor binding sites and artificial binding sites engineered to act as pseudo-receptors and portions and fragments thereof.

[0453] The circPs that comprise at least one sensor sequence and encode at least one peptide or polypeptide of interest are known as circular RNA sponges or circRNA-SP. As used herein, “circular RNA sponges” or “circRNA-SP” means a circular polynucleotide that comprises at least one sensor sequence and at least one region encoding at least one peptide or polypeptide of interest.

[0454] As used herein, the term “circular construct” refers to a circular polynucleotide transcript that can act substantially similar to and have properties of a RNA molecule. In some embodiments, the circular construct acts as an mRNA. If the circular construct encodes one or more peptides or polypeptides of interest (e.g., a circRNA or circRNA-SP) then the polynucleotide transcript retains sufficient structural and/or chemical features to allow the polypeptide of interest encoded therein to be translated. Circular constructs can be polynucleotides of the disclosure. When structurally or chemically modified, the construct can be referred to as a modified circP, modified circSP, modified circRNA or modified circRNA-SP.

[0455] Circular polynucleotides, formulations and compositions comprising circular polynucleotides, and methods of making, using and administering circular polynucleotides are also disclosed in International Patent Application No. PCT/US2014/53904 the contents of which is incorporated by reference in its entirety.

[0456] In some embodiments, the circular polynucleotide encodes an MCM protein or a functional fragment thereof. In some embodiments, the circular polynucleotides of the disclosure comprise any one of the human MCM nucleic acid selected from SEQ ID NOs: 1-207, 732-765, and 772. In some embodiments, the circular polynucleotide encodes a human MCM or functional fragment thereof comprising at least one amino acid mutation from the wild type sequence. In some embodiments, the circular polynucleotide encodes an MCM mutant comprising one or more of the point mutations V69, T499, H532, A598, and V671. In some embodiments, the expression of the encoded polypeptide is increased. In some embodiments, the circular polynucleotide increases MCM expression levels in cells when introduced into those cells, e.g., by 20-50%, at least 20%, at least 25%, at least 30%, at least 35%, at least 40%, at least 45%, or at least 50%.

### Multimers of Polynucleotides

[0457] The disclosure also includes multimers of polynucleotides comprising the polynucleotide described herein, i.e., a polynucleotide comprising an ORF encoding an MCM polypeptide.

[0458] In some embodiments, multiple distinct chimeric polynucleotides and/or IVT polynucleotides can be linked together through the 3′-end using nucleotides that are modified at the 3′-terminus. Chemical conjugation can be used to control the stoichiometry of delivery into cells. For example, the glyoxylate cycle enzymes, isocitrate lyase and malate synthase, can be supplied into cells at a 1:1 ratio to alter cellular fatty acid metabolism. This ratio can be controlled by chemically linking chimeric polynucleotides and/or IVT polynucleotides using a 3′-azido terminated nucleotide on one polynucleotides species and a C5-ethynyl or alkynyl-containing nucleotide on the opposite polynucleotide species. The modified nucleotide is added post-transcriptionally using terminal transferase (New England Biolabs, Ipswich, Mass.) according to the manufacturer's protocol. After the addition of the 3′-modified nucleotide, the two polynucleotides species can be combined in an aqueous solution, in the presence or absence of copper, to form a new covalent linkage via a click chemistry mechanism as described in the literature.

[0459] In another example, more than two chimeric polynucleotides and/or IVT polynucleotides can be linked together using a functionalized linker molecule. For example, a functionalized saccharide molecule can be chemically modified to contain multiple chemical reactive groups (SH—, NH₂—, N₃, etc. . . . ) to react with the cognate moiety on a 3′-functionalized mRNA molecule (i.e., a 3′-maleimide ester, 3′-NHS-ester, alkynyl). The number of reactive groups on the modified saccharide can be controlled in a stoichiometric fashion to directly control the stoichiometric ratio of conjugated chimeric polynucleotides and/or IVT polynucleotides.

[0460] In some embodiments, the chimeric polynucleotides and/or IVT polynucleotides can be linked together in a pattern. The pattern can be a simple alternating pattern such as CD[CD]ₓ where each “C” and each “D” represent a chimeric polynucleotide, IVT polynucleotide, different chimeric polynucleotides or different IVT polynucleotides. The pattern can repeat x number of times, where x=1-300. Patterns can also be alternating multiples such as CCDD[CCDD]ₓ (an alternating double multiple) or CCCDDD[CCCDDD]ₓ (an alternating triple multiple) pattern. The alternating double multiple or alternating triple multiple can repeat x number of times, where x=1-300.

### Conjugates and Combinations of Polynucleotides

[0461] The disclosure also includes conjugates and combinations of polynucleotides comprising the polynucleotide described herein, i.e., a polynucleotide comprising an ORF encoding an MCM polypeptide.

[0462] In order to further enhance protein production, polynucleotides of the present disclosure can be designed to be conjugated to other polynucleotides, dyes, or other agents.

[0463] Conjugation can result in increased stability and/or half-life and can be particularly useful in targeting the polynucleotides to specific sites in the cell, tissue or organism.

[0464] In some embodiments, the polynucleotides can be administered with, conjugated to or further encode one or more of RNAi agents, siRNAs, shRNAs, miRNAs, miRNA binding sites, antisense RNAs, ribozymes, catalytic DNA, tRNA, RNAs that induce triple helix formation, aptamers or vectors, and the like.

### Bifunctional Polynucleotides

[0465] The disclosure also includes bifunctional polynucleotides comprising the polynucleotide described herein, i.e., a polynucleotide comprising an ORF encoding an MCM polypeptide.

[0466] In some embodiments of the disclosure are bifunctional polynucleotides (e.g., bifunctional IVT polynucleotides, bifunctional chimeric polynucleotides or bifunctional circular polynucleotides). As the name implies, bifunctional polynucleotides are those having or capable of at least two functions. These molecules are also by convention be referred to as multi-functional.

[0467] The multiple functionalities of bifunctional polynucleotides can be encoded by the RNA (the function cannot manifest until the encoded product is translated) or can be a property of the polynucleotide itself. It can be structural or chemical. Bifunctional modified polynucleotides can comprise a function that is covalently or electrostatically associated with the polynucleotides. Further, the two functions can be provided in the context of a complex of a chimeric polynucleotide and another molecule.

[0468] Bifunctional polynucleotides can encode peptides that are anti-proliferative. These peptides can be linear, cyclic, constrained or random coil. They can function as aptamers, signaling molecules, ligands or mimics or mimetics thereof. Anti-proliferative peptides can, as translated, be from 3 to 50 amino acids in length. They can be 5-40, 10-30, or approximately 15 amino acids long. They can be single chain, multichain or branched and can form complexes, aggregates or any multi-unit structure once translated.

### Noncoding Polynucleotides

[0469] The disclosure also includes a noncoding polynucleotide comprising the polynucleotide described herein, i.e., a polynucleotide comprising an ORF encoding an MCM polypeptide.

[0470] The polynucleotides described herein can further comprise sequences that are partially or substantially not translatable, e.g., having a noncoding region. As one non-limiting example, the noncoding region can be the first region of the IVT polynucleotide or the circular polynucleotide. Alternatively, the noncoding region can be a region other than the first region. As another non-limiting example, the noncoding region can be the A, B and/or C region of the chimeric polynucleotide.

[0471] Such molecules are generally not translated, but can exert an effect on protein production by one or more of binding to and sequestering one or more translational machinery components such as a ribosomal protein or a transfer RNA (tRNA), thereby effectively reducing protein expression in the cell or modulating one or more pathways or cascades in a cell that in turn alters protein levels. The polynucleotide can contain or encode one or more long noncoding RNA (lncRNA, or lincRNA) or portion thereof, a small nucleolar RNA (sno-RNA), micro RNA (miRNA), small interfering RNA (siRNA) or Piwi-interacting RNA (piRNA). Examples of such lncRNA molecules and RNAi constructs designed to target such lncRNA any of which can be encoded in the polynucleotides are disclosed in International Publication, WO2012/018881 A2, the contents of which are incorporated herein by reference in their entirety.

### Cytotoxic Nucleosides

[0472] In some embodiments, the polynucleotides of the present disclosure (i.e., a polynucleotide comprising an ORF encoding an MCM polypeptide) can further incorporate one or more cytotoxic nucleosides.

### Untranslated Regions (UTRs)

[0473] Untranslated regions (UTRs) are nucleic acid sections of a polynucleotide before a start codon (5′UTR) and after a stop codon (3′UTR) that are not translated. In some embodiments, a polynucleotide (e.g., a ribonucleic acid (RNA), e.g., a messenger RNA (mRNA)) of the disclosure comprising an open reading frame (ORF) encoding an MCM polypeptide further comprises UTR (e.g., a 5′UTR or functional fragment thereof, a 3′UTR or functional fragment thereof, or a combination thereof).

[0474] A UTR can be homologous or heterologous to the coding region in a polynucleotide. In some embodiments, the UTR is homologous to the ORF encoding the MCM polypeptide. In some embodiments, the UTR is heterologous to the ORF encoding the MCM polypeptide. In some embodiments, the polynucleotide comprises two or more 5′UTRs or functional fragments thereof, each of which have the same or different nucleotide sequences. In some embodiments, the polynucleotide comprises two or more 3′UTRs or functional fragments thereof, each of which have the same or different nucleotide sequences.

[0475] In some embodiments, the 5′UTR or functional fragment thereof, 3′ UTR or functional fragment thereof, or any combination thereof is sequence optimized.

[0476] In some embodiments, the 5′UTR or functional fragment thereof, 3′ UTR or functional fragment thereof, or any combination thereof comprises at least one chemically modified nucleobase, e.g., 5-methoxyuracil.

[0477] UTRs can have features that provide a regulatory role, e.g., increased or decreased stability, localization and/or translation efficiency. A polynucleotide comprising a UTR can be administered to a cell, tissue, or organism, and one or more regulatory features can be measured using routine methods. In some embodiments, a functional fragment of a 5′UTR or 3′UTR comprises one or more regulatory features of a full length 5′ or 3′ UTR, respectively.

[0478] Natural 5′UTRs bear features that play roles in translation initiation. They harbor signatures like Kozak sequences that are commonly known to be involved in the process by which the ribosome initiates translation of many genes. Kozak sequences have the consensus CCR(A/G)CCAUGG, where R is a purine (adenine or guanine) three bases upstream of the start codon (AUG), which is followed by another ‘G’. 5′UTRs also have been known to form secondary structures that are involved in elongation factor binding.

[0479] By engineering the features typically found in abundantly expressed genes of specific target organs, one can enhance the stability and protein production of a polynucleotide. For example, introduction of 5′UTR of liver-expressed mRNA, such as albumin, serum amyloid A, Apolipoprotein A/B/E, transferrin, alpha fetoprotein, erythropoietin, or Factor VIII, can enhance expression of polynucleotides in hepatic cell lines or liver. Likewise, use of 5′UTR from other tissue-specific mRNA to improve expression in that tissue is possible for muscle (e.g., MyoD, Myosin, Myoglobin, Myogenin, Herculin), for endothelial cells (e.g., Tie-1, CD36), for myeloid cells (e.g., C/EBP, AML1, G-CSF, GM-CSF, CD11b, MSR, Fr-1, i-NOS), for leukocytes (e.g., CD45, CD18), for adipose tissue (e.g., CD36, GLUT4, ACRP30, adiponectin) and for lung epithelial cells (e.g., SP-A/B/C/D).

[0480] In some embodiments, UTRs are selected from a family of transcripts whose proteins share a common function, structure, feature or property. For example, an encoded polypeptide can belong to a family of proteins (i.e., that share at least one function, structure, feature, localization, origin, or expression pattern), which are expressed in a particular cell, tissue or at some time during development. The UTRs from any of the genes or mRNA can be swapped for any other UTR of the same or different family of proteins to create a new polynucleotide.

[0481] In some embodiments, the 5′UTR and the 3′UTR can be heterologous. In some embodiments, the 5′UTR can be derived from a different species than the 3′UTR. In some embodiments, the 3′UTR can be derived from a different species than the 5′UTR.

[0482] Co-owned International Patent Application No. PCT/US2014/021522 (Publ. No. WO/2014/164253, incorporated herein by reference in its entirety) provides a listing of exemplary UTRs that can be utilized in the polynucleotide of the present disclosure as flanking regions to an ORF.

[0483] Exemplary UTRs of the application include, but are not limited to, one or more 5′UTR and/or 3′UTR derived from the nucleic acid sequence of: a globin, such as an a- or 3-globin (e.g., a Xenopus, mouse, rabbit, or human globin); a strong Kozak translational initiation signal; a CYBA (e.g., human cytochrome b-245 α polypeptide); an albumin (e.g., human albumin7); a HSD17B4 (hydroxysteroid (17-β) dehydrogenase); a virus (e.g., a tobacco etch virus (TEV), a Venezuelan equine encephalitis virus (VEEV), a Dengue virus, a cytomegalovirus (CMV) (e.g., CMV immediate early 1 (IE1)), a hepatitis virus (e.g., hepatitis B virus), a sindbis virus, or a PAV barley yellow dwarf virus); a heat shock protein (e.g., hsp70); a translation initiation factor (e.g., elF4G); a glucose transporter (e.g., hGLUT1 (human glucose transporter 1)); an actin (e.g., human α or β actin); a GAPDH; a tubulin; a histone; a citric acid cycle enzyme; a topoisomerase (e.g., a 5′UTR of a TOP gene lacking the 5′ TOP motif (the oligopyrimidine tract)); a ribosomal protein Large 32 (L32); a ribosomal protein (e.g., human or mouse ribosomal protein, such as, for example, rps9); an ATP synthase (e.g., ATP5A1 or the β subunit of mitochondrial H⁺-ATP synthase); a growth hormone e (e.g., bovine (bGH) or human (hGH)); an elongation factor (e.g., elongation factor 1 α1 (EEF1A1)); a manganese superoxide dismutase (MnSOD); a myocyte enhancer factor 2A (MEF2A); a β-F1-ATPase, a creatine kinase, a myoglobin, a granulocyte-colony stimulating factor (G-CSF); a collagen (e.g., collagen type I, alpha 2 (Col1A2), collagen type I, alpha 1 (Col1A1), collagen type VI, alpha 2 (Col6A2), collagen type VI, alpha 1 (Col6A1)); a ribophorin (e.g., ribophorin I (RPNI)); a low density lipoprotein receptor-related protein (e.g., LRP1); a cardiotrophin-like cytokine factor (e.g., Nnt1); calreticulin (Calr); a procollagen-lysine, 2-oxoglutarate 5-dioxygenase 1 (Plod1); and a nucleobindin (e.g., Nucb1).

[0484] Other exemplary 5′ and 3′ UTRs include, but are not limited to, those described in Karikó et al., Mol. Ther. 2008 16(11):1833-1840; Karikó et al., Mol. Ther. 2012 20(5):948-953; Karikó et al., Nucleic Acids Res. 2011 39(21):e142; Strong et al., Gene Therapy 1997 4:624-627; Hansson et al., J. Biol. Chem. 2015 290(9):5661-5672; Yu et al., Vaccine 2007 25(10):1701-1711; Cafri et al., Mol. Ther. 2015 23(8):1391-1400; Andries et al., Mol. Pharm. 2012 9(8):2136-2145; Crowley et al., Gene Ther. 2015 Jun. 30, doi:10.1038/gt.2015.68; Ramunas et al., FASEB J. 2015 29(5):1930-1939; Wang et al., Curr. Gene Ther. 2015 15(4):428-435; Holtkamp et al., Blood 2006 108(13):4009-4017; Kormann et al., Nat. Biotechnol. 2011 29(2):154-157; Poleganov et al., Hum. Gen. Ther. 2015 26(11):751-766; Warren et al., Cell Stem Cell 2010 7(5):618-630; Mandal and Rossi, Nat. Protoc. 2013 8(3):568-582; Holcik and Liebhaber, PNAS 1997 94(6):2410-2414; Ferizi et al., Lab Chip. 2015 15(17):3561-3571; Thess et al., Mol. Ther. 2015 23(9):1456-1464; Boros et al., PLoS One 2015 10(6):e0131141; Boros et al., J. Photochem. Photobiol. B. 2013 129:93-99; Andries et al., J. Control. Release 2015 217:337-344; Zinckgraf et al., Vaccine 2003 21(15):1640-9; Garneau et al., J. Virol. 2008 82(2):880-892; Holden and Harris, Virology 2004 329(1):119-133; Chiu et al., J. Virol. 2005 79(13):8303-8315; Wang et al., EMBO J. 1997 16(13):4107-4116; Al-Zoghaibi et al., Gene 2007 391(1-2):130-9; Vivinus et al., Eur. J. Biochem. 2001 268(7):1908-1917; Gan and Rhoads, J. Biol. Chem. 1996 271(2):623-626; Boado et al., J. Neurochem. 1996 67(4):1335-1343; Knirsch and Clerch, Biochem. Biophys. Res. Commun. 2000 272(1):164-168; Chung et al., Biochemistry 1998 37(46):16298-16306; Izquierdo and Cuevza, Biochem. J. 2000 346 Pt 3:849-855; Dwyer et al., J. Neurochem. 1996 66(2):449-458; Black et al., Mol. Cell. Biol. 1997 17(5):2756-2763; Izquierdo and Cuevza, Mol. Cell. Biol. 1997 17(9):5255-5268; U.S. Pat. No. 8,278,036; U.S. Pat. No. 8,748,089; U.S. Pat. No. 8,835,108; U.S. Pat. No. 9,012,219; US2010/0129877; US2011/0065103; US2011/0086904; US2012/0195936; US2014/020675; US2013/0195967; US2014/029490; US2014/0206753; WO2007/036366; WO2011/015347; WO2012/072096; WO2013/143555; WO2014/071963; WO2013/185067; WO2013/182623; WO2014/089486; WO2013/185069; WO2014/144196; WO2014/152659; 2014/152673; WO2014/152940; WO2014/152774; WO2014/153052; WO2014/152966, WO2014/152513; WO2015/101414; WO2015/101415; WO2015/062738; and WO2015/024667; the contents of each of which are incorporated herein by reference in their entirety.

[0485] In some embodiments, the 5′UTR is selected from the group consisting of a β-globin 5′UTR; a 5′UTR containing a strong Kozak translational initiation signal; a cytochrome b-245 α polypeptide (CYBA) 5′UTR; a hydroxysteroid (17-β) dehydrogenase (HSD17B4) 5′UTR; a Tobacco etch virus (TEV) 5′UTR; a Venezuelen equine encephalitis virus (TEEV) 5′UTR; a 5′ proximal open reading frame of rubella virus (RV) RNA encoding nonstructural proteins; a Dengue virus (DEN) 5′UTR; a heat shock protein 70 (Hsp70) 5′UTR; a eIF4G 5′UTR; a GLUT1 5′UTR; functional fragments thereof and any combination thereof.

[0486] In some embodiments, the 3′UTR is selected from the group consisting of a β-globin 3′UTR; a CYBA 3′UTR; an albumin 3′UTR; a growth hormone (GH) 3′UTR; a VEEV 3′UTR; a hepatitis B virus (HBV) 3′UTR; α-globin 3′UTR; a DEN 3′UTR; a PAV barley yellow dwarf virus (BYDV-PAV) 3′UTR; an elongation factor 1 α1 (EEF1A1) 3′UTR; a manganese superoxide dismutase (MnSOD) 3′UTR; a β subunit of mitochondrial H(+)-ATP synthase (β-mRNA) 3′UTR; a GLUT1 3′UTR; a MEF2A 3′UTR; a β-F1-ATPase 3′UTR; functional fragments thereof and combinations thereof.

[0487] Other exemplary UTRs include, but are not limited to, one or more of the UTRs, including any combination of UTRs, disclosed in WO2014/164253, the contents of which are incorporated herein by reference in their entirety. Shown in Table 21 of U.S. Provisional Application No. 61/775,509 and in Table 22 of U.S. Provisional Application No. 61/829,372, the contents of each are incorporated herein by reference in their entirety, is a listing start and stop sites for 5′UTRs and 3′UTRs. In Table 21, each 5′UTR (5′-UTR-005 to 5′-UTR 68511) is identified by its start and stop site relative to its native or wild-type (homologous) transcript (ENST; the identifier used in the ENSEMBL database).

[0488] Wild-type UTRs derived from any gene or mRNA can be incorporated into the polynucleotides of the disclosure. In some embodiments, a UTR can be altered relative to a wild type or native UTR to produce a variant UTR, e.g., by changing the orientation or location of the UTR relative to the ORF; or by inclusion of additional nucleotides, deletion of nucleotides, swapping or transposition of nucleotides. In some embodiments, variants of 5′ or 3′ UTRs can be utilized, for example, mutants of wild type UTRs, or variants wherein one or more nucleotides are added to or removed from a terminus of the UTR.

[0489] Additionally, one or more synthetic UTRs can be used in combination with one or more non-synthetic UTRs. See, e.g., Mandal and Rossi, Nat. Protoc. 2013 8(3):568-82, the contents of which are incorporated herein by reference in their entirety, and sequences available at www.addgene.org/Derrick_Rossi/. UTRs or portions thereof can be placed in the same orientation as in the transcript from which they were selected or can be altered in orientation or location. Hence, a 5′ and/or 3′ UTR can be inverted, shortened, lengthened, or combined with one or more other 5′ UTRs or 3′ UTRs.

[0490] In some embodiments, the polynucleotide comprises multiple UTRs, e.g., a double, a triple or a quadruple 5′UTR or 3′UTR. For example, a double UTR comprises two copies of the same UTR either in series or substantially in series. For example, a double beta-globin 3′UTR can be used (see US2010/0129877, the contents of which are incorporated herein by reference in its entirety).

[0491] Tables 5 and 6 provide a listing of exemplary UTRs that can be utilized in the polynucleotides of the present disclosure. Shown in Table 5 is a listing of a 5′-untranslated region of the disclosure. Variants of 5′ UTRs can be utilized wherein one or more nucleotides are added or removed to the termini, including A, T, C or G.

TABLE 5
5′-Untranslated Regions

| 5′ UTR | Name/ | | SEQ ID |
|---|---|---|---|
| Identifier | Description | Sequence | NO. |
| 5UTR-001 | Upstream UTR | GGGAAATAAGAGAGAAAAGAAGAGTAAGAAGAAATAT | 215 |
| | | AAGAGCCACC | |
| 5UTR-002 | Upstream UTR | GGGAGATCAGAGAGAAAAGAAGAGTAAGAAGAAATAT | 216 |
| | | AAGAGCCACC | |
| 5UTR-003 | Upstream UTR | GGAATAAAAGTCTCAACACAACATATACAAAACAAAC | 217 |
| | | GAATCTCAAGCAATCAAGCATTCTACTTCTATTGCAG | |
| | | CAATTTAAATCATTTCTTTTAAAGCAAAAGCAATTTT | |
| | | CTGAAAATTTTCACCATTTACGAACGATAGCAAC | |
| 5UTR-004 | Upstream UTR | GGGAGACAAGCUUGGCAUUCCGGUACUGUUGGUAAAG | 218 |
| | | CCACC | |
| 5UTR-005 | Upstream UTR | GGGAGATCAGAGAGAAAAGAAGAGTAAGAAGAAATAT | 219 |
| | | AAGAGCCACC | |
| 5UTR-006 | Upstream UTR | GGAATAAAAGTCTCAACACAACATATACAAAACAAAC | 220 |
| | | GAATCTCAAGCAATCAAGCATTCTACTTCTATTGCAG | |
| | | CAATTTAAATCATTTCTTTTAAAGCAAAAGCAATTTT | |
| | | CTGAAAATTTTCACCATTTACGAACGATAGCAAC | |
| 5UTR-007 | Upstream UTR | GGGAGACAAGCUUGGCAUUCCGGUACUGUUGGUAAAG | 221 |
| | | CCACC | |
| 5UTR-008 | Upstream UTR | GGGAATTAACAGAGAAAAGAAGAGTAAGAAGAAATAT | 222 |
| | | AAGAGCCACC | |
| 5UTR-009 | Upstream UTR | GGGAAATTAGACAGAAAAGAAGAGTAAGAAGAAATAT | 223 |
| | | AAGAGCCACC | |
| 5UTR-010 | Upstream UTR | GGGAAATAAGAGAGTAAAGAACAGTAAGAAGAAATAT | 224 |
| | | AAGAGCCACC | |
| 5UTR-011 | Upstream UTR | GGGAAAAAAGAGAGAAAAGAAGACTAAGAAGAAATAT | 225 |
| | | AAGAGCCACC | |
| 5UTR-012 | Upstream UTR | GGGAAATAAGAGAGAAAAGAAGAGTAAGAAGATATAT | 226 |
| | | AAGAGCCACC | |
| 5UTR-013 | Upstream UTR | GGGAAATAAGAGACAAAACAAGAGTAAGAAGAAATAT | 227 |
| | | AAGAGCCACC | |
| 5UTR-014 | Upstream UTR | GGGAAATTAGAGAGTAAAGAACAGTAAGTAGAATTAA | 228 |
| | | AAGAGCCACC | |
| 5UTR-015 | Upstream UTR | GGGAAATAAGAGAGAATAGAAGAGTAAGAAGAAATAT | 229 |
| | | AAGAGCCACC | |
| 5UTR-016 | Upstream UTR | GGGAAATAAGAGAGAAAAGAAGAGTAAGAAGAAAATT | 230 |
| | | AAGAGCCACC | |
| 5UTR-017 | Upstream UTR | GGGAAATAAGAGAGAAAAGAAGAGTAAGAAGAAATTT | 231 |
| | | AAGAGCCACC | |
| 5UTR-018 | Upstream UTR | TCAAGCTTTTGGACCCTCGTACAGAAGCTAATACGAC | 266 |
| | | TCACTATAGGGAAATAAGAGAGAAAAGAAGAGTAAGA | |
| | | AGAAATATAAGAGCCACC | |
| 142-3p | Upstream UTR | TGATAATAGTCCATAAAGTAGGAAACACTACAGCTGG | 725 |
| UTR-001 | including | AGCCTCGGTGGCCATGCTTCTTGCCCCTTGGGCCTCC | |
| | miR142-3p | CCCCAGCCCCTCCTCCCCTTCCTGCACCCGTACCCCC | |
| | | GTGGTCTTTGAATAAAGTCTGAGTGGGCGGC | |
| 142-3p | Upstream UTR | TGATAATAGGCTGGAGCCTCGGTGGCTCCATAAAGTA | 726 |
| UTR-002 | including | GGAAACACTACACATGCTTCTTGCCCCTTGGGCCTCC | |
| | miR142-3p | CCCCAGCCCCTCCTCCCCTTCCTGCACCCGTACCCCC | |
| | | GTGGTCTTTGAATAAAGTCTGAGTGGGCGGC | |
| 142-3p | Upstream UTR | TGATAATAGGCTGGAGCCTCGGTGGCCATGCTTCTTG | 727 |
| UTR-003 | including | CCCCTTCCATAAAGTAGGAAACACTACATGGGCCTCC | |
| | miR142-3p | CCCCAGCCCCTCCTCCCCTTCCTGCACCCGTACCCCC | |
| | | GTGGTCTTTGAATAAAGTCTGAGTGGGCGGC | |
| 142-3p | Upstream UTR | TGATAATAGGCTGGAGCCTCGGTGGCCATGCTTCTTG | 728 |
| UTR-004 | including | CCCCTTGGGCCTCCCCCCAGTCCATAAAGTAGGAAAC | |
| | miR142-3p | ACTACACCCCTCCTCCCCTTCCTGCACCCGTACCCCC | |
| | | GTGGTCTTTGAATAAAGTCTGAGTGGGCGGC | |
| 142-3p | Upstream UTR | TGATAATAGGCTGGAGCCTCGGTGGCCATGCTTCTTG | 729 |
| UTR-005 | including | CCCCTTGGGCCTCCCCCCAGCCCCTCCTCCCCTTCTC | |
| | miR142-3p | CATAAAGTAGGAAACACTACACTGCACCCGTACCCCC | |
| | | GTGGTCTTTGAATAAAGTCTGAGTGGGCGGC | |
| 142-3p | Upstream UTR | TGATAATAGGCTGGAGCCTCGGTGGCCATGCTTCTTG | 730 |
| UTR-006 | including | CCCCTTGGGCCTCCCCCCAGCCCCTCCTCCCCTTCCT | |
| | miR142-3p | GCACCCGTACCCCCTCCATAAAGTAGGAAACACTACA | |
| | | GTGGTCTTTGAATAAAGTCTGAGTGGGCGGC | |
| 142-3p | Upstream UTR | TGATAATAGGCTGGAGCCTCGGTGGCCATGCTTCTTG | 731 |
| UTR-007 | including | CCCCTTGGGCCTCCCCCCAGCCCCTCCTCCCCTTCCT | |
| | miR142-3p | GCACCCGTACCCCCGTGGTCTTTGAATAAAGTTCCAT | |
| | | AAAGTAGGAAACACTACACTGAGTGGGCGGC | |

[0492] In a particular embodiment, the 5′ UTR useful for the polynucleotides comprises SEQ ID NO: 266.

[0493] Shown in Table 6 is a listing of 3′-untranslated regions of the disclosure. Variants of 3′ UTRs can be utilized wherein one or more nucleotides are added or removed to the termini, including A, T, C or G.

TABLE 6
3′-Untranslated Regions

| | | | SEQ |
|---|---|---|---|
| 3′ UTR | Name/ | | ID |
| Identifier | Description | Sequence | NO. |
| 3UTR-001 | Creatine | GCGCCTGCCCACCTGCCACCGACTGCTGGAACCCAGCCAGTGG | 232 |
| | Kinase | GAGGGCCTGGCCCACCAGAGTCCTGCTCCCTCACTCCTCGCCC | |
| | | CGCCCCCTGTCCCAGAGTCCCACCTGGGGGCTCTCTCCACCCT | |
| | | TCTCAGAGTTCCAGTTTCAACCAGAGTTCCAACCAATGGGCTC | |
| | | CATCCTCTGGATTCTGGCCAATGAAATATCTCCCTGGCAGGGT | |
| | | CCTCTTCTTTTCCCAGAGCTCCACCCCAACCAGGAGCTCTAGT | |
| | | TAATGGAGAGCTCCCAGCACACTCGGAGCTTGTGCTTTGTCTC | |
| | | CACGCAAAGCGATAAATAAAAGCATTGGTGGCCTTTGGTCTTT | |
| | | GAATAAAGCCTGAGTAGGAAGTCTAGA | |
| 3UTR-002 | Myoglobin | GCCCCTGCCGCTCCCACCCCCACCCATCTGGGCCCCGGGTTCA | 233 |
| | | AGAGAGAGCGGGGTCTGATCTCGTGTAGCCATATAGAGTTTGC | |
| | | TTCTGAGTGTCTGCTTTGTTTAGTAGAGGTGGGCAGGAGGAGC | |
| | | TGAGGGGCTGGGGCTGGGGTGTTGAAGTTGGCTTTGCATGCCC | |
| | | AGCGATGCGCCTCCCTGTGGGATGTCATCACCCTGGGAACCGG | |
| | | GAGTGGCCCTTGGCTCACTGTGTTCTGCATGGTTTGGATCTGA | |
| | | ATTAATTGTCCTTTCTTCTAAATCCCAACCGAACTTCTTCCAA | |
| | | CCTCCAAACTGGCTGTAACCCCAAATCCAAGCCATTAACTACA | |
| | | CCTGACAGTAGCAATTGTCTGATTAATCACTGGCCCCTTGAAG | |
| | | ACAGCAGAATGTCCCTTTGCAATGAGGAGGAGATCTGGGCTGG | |
| | | GCGGGCCAGCTGGGGAAGCATTTGACTATCTGGAACTTGTGTG | |
| | | TGCCTCCTCAGGTATGGCAGTGACTCACCTGGTTTTAATAAAA | |
| | | CAACCTGCAACATCTCATGGTCTTTGAATAAAGCCTGAGTAGG | |
| | | AAGTCTAGA | |
| 3UTR-003 | α-actin | ACACACTCCACCTCCAGCACGCGACTTCTCAGGACGACGAATC | 234 |
| | | TTCTCAATGGGGGGGCGGCTGAGCTCCAGCCACCCCGCAGTCA | |
| | | CTTTCTTTGTAACAACTTCCGTTGCTGCCATCGTAAACTGACA | |
| | | CAGTGTTTATAACGTGTACATACATTAACTTATTACCTCATTT | |
| | | TGTTATTTTTCGAAACAAAGCCCTGTGGAAGAAAATGGAAAAC | |
| | | TTGAAGAAGCATTAAAGTCATTCTGTTAAGCTGCGTAAATGGT | |
| | | CTTTGAATAAAGCCTGAGTAGGAAGTCTAGA | |
| 3UTR-004 | Albumin | CATCACATTTAAAAGCATCTCAGCCTACCATGAGAATAAGAGA | 235 |
| | | AAGAAAATGAAGATCAAAAGCTTATTCATCTGTTTTTCTTTTT | |
| | | CGTTGGTGTAAAGCCAACACCCTGTCTAAAAAACATAAATTTC | |
| | | TTTAATCATTTTGCCTCTTTTCTCTGTGCTTCAATTAATAAAA | |
| | | AATGGAAAGAATCTAATAGAGTGGTACAGCACTGTTATTTTTC | |
| | | AAAGATGTGTTGCTATCCTGAAAATTCTGTAGGTTCTGTGGAA | |
| | | GTTCCAGTGTTCTCTCTTATTCCACTTCGGTAGAGGATTTCTA | |
| | | GTTTCTTGTGGGCTAATTAAATAAATCATTAATACTCTTCTAA | |
| | | TGGTCTTTGAATAAAGCCTGAGTAGGAAGTCTAGA | |
| 3UTR-005 | α-globin | GCTGCCTTCTGCGGGGCTTGCCTTCTGGCCATGCCCTTCTTCT | 236 |
| | | CTCCCTTGCACCTGTACCTCTTGGTCTTTGAATAAAGCCTGAG | |
| | | TAGGAAGGCGGCCGCTCGAGCATGCATCTAGA | |
| 3UTR-006 | G-CSF | GCCAAGCCCTCCCCATCCCATGTATTTATCTCTATTTAATATT | 237 |
| | | TATGTCTATTTAAGCCTCATATTTAAAGACAGGGAAGAGCAGA | |
| | | ACGGAGCCCCAGGCCTCTGTGTCCTTCCCTGCATTTCTGAGTT | |
| | | TCATTCTCCTGCCTGTAGCAGTGAGAAAAAGCTCCTGTCCTCC | |
| | | CATCCCCTGGACTGGGAGGTAGATAGGTAAATACCAAGTATTT | |
| | | ATTACTATGACTGCTCCCCAGCCCTGGCTCTGCAATGGGCACT | |
| | | GGGATGAGCCGCTGTGAGCCCCTGGTCCTGAGGGTCCCCACCT | |
| | | GGGACCCTTGAGAGTATCAGGTCTCCCACGTGGGAGACAAGAA | |
| | | ATCCCTGTTTAATATTTAAACAGCAGTGTTCCCCATCTGGGTC | |
| | | CTTGCACCCCTCACTCTGGCCTCAGCCGACTGCACAGCGGCCC | |
| | | CTGCATCCCCTTGGCTGTGAGGCCCCTGGACAAGCAGAGGTGG | |
| | | CCAGAGCTGGGAGGCATGGCCCTGGGGTCCCACGAATTTGCTG | |
| | | GGGAATCTCGTTTTTCTTCTTAAGACTTTTGGGACATGGTTTG | |
| | | ACTCCCGAACATCACCGACGCGTCTCCTGTTTTTCTGGGTGGC | |
| | | CTCGGGACACCTGCCCTGCCCCCACGAGGGTCAGGACTGTGAC | |
| | | TCTTTTTAGGGCCAGGCAGGTGCCTGGACATTTGCCTTGCTGG | |
| | | ACGGGGACTGGGGATGTGGGAGGGAGCAGACAGGAGGAATCAT | |
| | | GTCAGGCCTGTGTGTGAAAGGAAGCTCCACTGTCACCCTCCAC | |
| | | CTCTTCACCCCCCACTCACCAGTGTCCCCTCCACTGTCACATT | |
| | | GTAACTGAACTTCAGGATAATAAAGTGTTTGCCTCCATGGTCT | |
| | | TTGAATAAAGCCTGAGTAGGAAGGCGGCCGCTCGAGCATGCAT | |
| | | CTAGA | |
| 3UTR-007 | Col1a2; | ACTCAATCTAAATTAAAAAAGAAAGAAATTTGAAAAAACTTTC | 238 |
| | collagen, | TCTTTGCCATTTCTTCTTCTTCTTTTTTAACTGAAAGCTGAAT | |
| | type I, alpha 2 | CCTTCCATTTCTTCTGCACATCTACTTGCTTAAATTGTGGGCA | |
| | | AAAGAGAAAAAGAAGGATTGATCAGAGCATTGTGCAATACAGT | |
| | | TTCATTAACTCCTTCCCCCGCTCCCCCAAAAATTTGAATTTTT | |
| | | TTTTCAACACTCTTACACCTGTTATGGAAAATGTCAACCTTTG | |
| | | TAAGAAAACCAAAATAAAAATTGAAAAATAAAAACCATAAACA | |
| | | TTTGCACCACTTGTGGCTTTTGAATATCTTCCACAGAGGGAAG | |
| | | TTTAAAACCCAAACTTCCAAAGGTTTAAACTACCTCAAAACAC | |
| | | TTTCCCATGAGTGTGATCCACATTGTTAGGTGCTGACCTAGAC | |
| | | AGAGATGAACTGAGGTCCTTGTTTTGTTTTGTTCATAATACAA | |
| | | AGGTGCTAATTAATAGTATTTCAGATACTTGAAGAATGTTGAT | |
| | | GGTGCTAGAAGAATTTGAGAAGAAATACTCCTGTATTGAGTTG | |
| | | TATCGTGTGGTGTATTTTTTAAAAAATTTGATTTAGCATTCAT | |
| | | ATTTTCCATCTTATTCCCAATTAAAAGTATGCAGATTATTTGC | |
| | | CCAAATCTTCTTCAGATTCAGCATTTGTTCTTTGCCAGTCTCA | |
| | | TTTTCATCTTCTTCCATGGTTCCACAGAAGCTTTGTTTCTTGG | |
| | | GCAAGCAGAAAAATTAAATTGTACCTATTTTGTATATGTGAGA | |
| | | TGTTTAAATAAATTGTGAAAAAAATGAAATAAAGCATGTTTGG | |
| | | TTTTCCAAAAGAACATAT | |
| 3UTR-008 | Col6a2; | CGCCGCCGCCCGGGCCCCGCAGTCGAGGGTCGTGAGCCCACCC | 239 |
| | collagen, | CGTCCATGGTGCTAAGCGGGCCCGGGTCCCACACGGCCAGCAC | |
| | type VI, | CGCTGCTCACTCGGACGACGCCCTGGGCCTGCACCTCTCCAGC | |
| | alpha 2 | TCCTCCCACGGGGTCCCCGTAGCCCCGGCCCCCGCCCAGCCCC | |
| | | AGGTCTCCCCAGGCCCTCCGCAGGCTGCCCGGCCTCCCTCCCC | |
| | | CTGCAGCCATCCCAAGGCTCCTGACCTACCTGGCCCCTGAGCT | |
| | | CTGGAGCAAGCCCTGACCCAATAAAGGCTTTGAACCCAT | |
| 3UTR-009 | RPN1; | GGGGCTAGAGCCCTCTCCGCACAGCGTGGAGACGGGGCAAGGA | 240 |
| | ribophorin I | GGGGGGTTATTAGGATTGGTGGTTTTGTTTTGCTTTGTTTAAA | |
| | | GCCGTGGGAAAATGGCACAACTTTACCTCTGTGGGAGATGCAA | |
| | | CACTGAGAGCCAAGGGGTGGGAGTTGGGATAATTTTTATATAA | |
| | | AAGAAGTTTTTCCACTTTGAATTGCTAAAAGTGGCATTTTTCC | |
| | | TATGTGCAGTCACTCCTCTCATTTCTAAAATAGGGACGTGGCC | |
| | | AGGCACGGTGGCTCATGCCTGTAATCCCAGCACTTTGGGAGGC | |
| | | CGAGGCAGGCGGCTCACGAGGTCAGGAGATCGAGACTATCCTG | |
| | | GCTAACACGGTAAAACCCTGTCTCTACTAAAAGTACAAAAAAT | |
| | | TAGCTGGGCGTGGTGGTGGGCACCTGTAGTCCCAGCTACTCGG | |
| | | GAGGCTGAGGCAGGAGAAAGGCATGAATCCAAGAGGCAGAGCT | |
| | | TGCAGTGAGCTGAGATCACGCCATTGCACTCCAGCCTGGGCAA | |
| | | CAGTGTTAAGACTCTGTCTCAAATATAAATAAATAAATAAATA | |
| | | AATAAATAAATAAATAAAAATAAAGCGAGATGTTGCCCTCAAA | |
| 3UTR-010 | LRP1; low | GGCCCTGCCCCGTCGGACTGCCCCCAGAAAGCCTCCTGCCCCC | 241 |
| | density | TGCCAGTGAAGTCCTTCAGTGAGCCCCTCCCCAGCCAGCCCTT | |
| | lipoprotein | CCCTGGCCCCGCCGGATGTATAAATGTAAAAATGAAGGAATTA | |
| | receptor- | CATTTTATATGTGAGCGAGCAAGCCGGCAAGCGAGCACAGTAT | |
| | related | TATTTCTCCATCCCCTCCCTGCCTGCTCCTTGGCACCCCCATG | |
| | protein 1 | CTGCCTTCAGGGAGACAGGCAGGGAGGGCTTGGGGCTGCACCT | |
| | | CCTACCCTCCCACCAGAACGCACCCCACTGGGAGAGCTGGTGG | |
| | | TGCAGCCTTCCCCTCCCTGTATAAGACACTTTGCCAAGGCTCT | |
| | | CCCCTCTCGCCCCATCCCTGCTTGCCCGCTCCCACAGCTTCCT | |
| | | GAGGGCTAATTCTGGGAAGGGAGAGTTCTTTGCTGCCCCTGTC | |
| | | TGGAAGACGTGGCTCTGGGTGAGGTAGGCGGGAAAGGATGGAG | |
| | | TGTTTTAGTTCTTGGGGGAGGCCACCCCAAACCCCAGCCCCAA | |
| | | CTCCAGGGGCACCTATGAGATGGCCATGCTCAACCCCCCTCCC | |
| | | AGACAGGCCCTCCCTGTCTCCAGGGCCCCCACCGAGGTTCCCA | |
| | | GGGCTGGAGACTTCCTCTGGTAAACATTCCTCCAGCCTCCCCT | |
| | | CCCCTGGGGACGCCAAGGAGGTGGGCCACACCCAGGAAGGGAA | |
| | | AGCGGGCAGCCCCGTTTTGGGGACGTGAACGTTTTAATAATTT | |
| | | TTGCTGAATTCCTTTACAACTAAATAACACAGATATTGTTATA | |
| | | AATAAAATTGT | |
| 3UTR-011 | Nnt1; | ATATTAAGGATCAAGCTGTTAGCTAATAATGCCACCTCTGCAG | 242 |
| | cardiotrophin- | TTTTGGGAACAGGCAAATAAAGTATCAGTATACATGGTGATGT | |
| | like | ACATCTGTAGCAAAGCTCTTGGAGAAAATGAAGACTGAAGAAA | |
| | cytokine | GCAAAGCAAAAACTGTATAGAGAGATTTTTCAAAAGCAGTAAT | |
| | factor 1 | CCCTCAATTTTAAAAAAGGATTGAAAATTCTAAATGTCTTTCT | |
| | | GTGCATATTTTTTGTGTTAGGAATCAAAAGTATTTTATAAAAG | |
| | | GAGAAAGAACAGCCTCATTTTAGATGTAGTCCTGTTGGATTTT | |
| | | TTATGCCTCCTCAGTAACCAGAAATGTTTTAAAAAACTAAGTG | |
| | | TTTAGGATTTCAAGACAACATTATACATGGCTCTGAAATATCT | |
| | | GACACAATGTAAACATTGCAGGCACCTGCATTTTATGTTTTTT | |
| | | TTTTCAACAAATGTGACTAATTTGAAACTTTTATGAACTTCTG | |
| | | AGCTGTCCCCTTGCAATTCAACCGCAGTTTGAATTAATCATAT | |
| | | CAAATCAGTTTTAATTTTTTAAATTGTACTTCAGAGTCTATAT | |
| | | TTCAAGGGCACATTTTCTCACTACTATTTTAATACATTAAAGG | |
| | | ACTAAATAATCTTTCAGAGATGCTGGAAACAAATCATTTGCTT | |
| | | TATATGTTTCATTAGAATACCAATGAAACATACAACTTGAAAA | |
| | | TTAGTAATAGTATTTTTGAAGATCCCATTTCTAATTGGAGATC | |
| | | TCTTTAATTTCGATCAACTTATAATGTGTAGTACTATATTAAG | |
| | | TGCACTTGAGTGGAATTCAACATTTGACTAATAAAATGAGTTC | |
| | | ATCATGTTGGCAAGTGATGTGGCAATTATCTCTGGTGACAAAA | |
| | | GAGTAAAATCAAATATTTCTGCCTGTTACAAATATCAAGGAAG | |
| | | ACCTGCTACTATGAAATAGATGACATTAATCTGTCTTCACTGT | |
| | | TTATAATACGGATGGATTTTTTTTCAAATCAGTGTGTGTTTTG | |
| | | AGGTCTTATGTAATTGATGACATTTGAGAGAAATGGTGGCTTT | |
| | | TTTTAGCTACCTCTTTGTTCATTTAAGCACCAGTAAAGATCAT | |
| | | GTCTTTTTATAGAAGTGTAGATTTTCTTTGTGACTTTGCTATC | |
| | | GTGCCTAAAGCTCTAAATATAGGTGAATGTGTGATGAATACTC | |
| | | AGATTATTTGTCTCTCTATATAATTAGTTTGGTACTAAGTTTC | |
| | | TCAAAAAATTATTAACACATGAAAGACAATCTCTAAACCAGAA | |
| | | AAAGAAGTAGTACAAATTTTGTTACTGTAATGCTCGCGTTTAG | |
| | | TGAGTTTAAAACACACAGTATCTTTTGGTTTTATAATCAGTTT | |
| | | CTATTTTGCTGTGCCTGAGATTAAGATCTGTGTATGTGTGTGT | |
| | | GTGTGTGTGTGCGTTTGTGTGTTAAAGCAGAAAAGACTTTTTT | |
| | | AAAAGTTTTAAGTGATAAATGCAATTTGTTAATTGATCTTAGA | |
| | | TCACTAGTAAACTCAGGGCTGAATTATACCATGTATATTCTAT | |
| | | TAGAAGAAAGTAAACACCATCTTTATTCCTGCCCTTTTTCTTC | |
| | | TCTCAAAGTAGTTGTAGTTATATCTAGAAAGAAGCAATTTTGA | |
| | | TTTCTTGAAAAGGTAGTTCCTGCACTCAGTTTAAACTAAAAAT | |
| | | AATCATACTTGGATTTTATTTATTTTTGTCATAGTAAAAATTT | |
| | | TAATTTATATATATTTTTATTTAGTATTATCTTATTCTTTGCT | |
| | | ATTTGCCAATCCTTTGTCATCAATTGTGTTAAATGAATTGAAA | |
| | | ATTCATGCCCTGTTCATTTTATTTTACTTTATTGGTTAGGATA | |
| | | TTTAAAGGATTTTTGTATATATAATTTCTTAAATTAATATTCC | |
| | | AAAAGGTTAGTGGACTTAGATTATAAATTATGGCAAAAATCTA | |
| | | AAAACAACAAAAATGATTTTTATACATTCTATTTCATTATTCC | |
| | | TCTTTTTCCAATAAGTCATACAATTGGTAGATATGACTTATTT | |
| | | TATTTTTGTATTATTCACTATATCTTTATGATATTTAAGTATA | |
| | | AATAATTAAAAAAATTTATTGTACCTTATAGTCTGTCACCAAA | |
| | | AAAAAAAAATTATCTGTAGGTAGTGAAATGCTAATGTTGATTT | |
| | | GTCTTTAAGGGCTTGTTAACTATCCTTTATTTTCTCATTTGTC | |
| | | TTAAATTAGGAGTTTGTGTTTAAATTACTCATCTAAGCAAAAA | |
| | | ATGTATATAAATCCCATTACTGGGTATATACCCAAAGGATTAT | |
| | | AAATCATGCTGCTATAAAGACACATGCACACGTATGTTTATTG | |
| | | CAGCACTATTCACAATAGCAAAGACTTGGAACCAACCCAAATG | |
| | | TCCATCAATGATAGACTTGATTAAGAAAATGTGCACATATACA | |
| | | CCATGGAATACTATGCAGCCATAAAAAAGGATGAGTTCATGTC | |
| | | CTTTGTAGGGACATGGATAAAGCTGGAAACCATCATTCTGAGC | |
| | | AAACTATTGCAAGGACAGAAAACCAAACACTGCATGTTCTCAC | |
| | | TCATAGGTGGGAATTGAACAATGAGAACACTTGGACACAAGGT | |
| | | GGGGAACACCACACACCAGGGCCTGTCATGGGGTGGGGGGAGT | |
| | | GGGGAGGGATAGCATTAGGAGATATACCTAATGTAAATGATGA | |
| | | GTTAATGGGTGCAGCACACCAACATGGCACATGTATACATATG | |
| | | TAGCAAACCTGCACGTTGTGCACATGTACCCTAGAACTTAAAG | |
| | | TATAATTAAAAAAAAAAAGAAAACAGAAGCTATTTATAAAGAA | |
| | | GTTATTTGCTGAAATAAATGTGATCTTTCCCATTAAAAAAATA | |
| | | AAGAAATTTTGGGGTAAAAAAACACAATATATTGTATTCTTGA | |
| | | AAAATTCTAAGAGAGTGGATGTGAAGTGTTCTCACCACAAAAG | |
| | | TGATAACTAATTGAGGTAATGCACATATTAATTAGAAAGATTT | |
| | | TGTCATTCCACAATGTATATATACTTAAAAATATGTTATACAC | |
| | | AATAAATACATACATTAAAAAATAAGTAAATGTA | |
| 3UTR-012 | Col6a1; | CCCACCCTGCACGCCGGCACCAAACCCTGTCCTCCCACCCCTC | 243 |
| | collagen, | CCCACTCATCACTAAACAGAGTAAAATGTGATGCGAATTTTCC | |
| | type VI, | CGACCAACCTGATTCGCTAGATTTTTTTTAAGGAAAAGCTTGG | |
| | alpha 1 | AAAGCCAGGACACAACGCTGCTGCCTGCTTTGTGCAGGGTCCT | |
| | | CCGGGGCTCAGCCCTGAGTTGGCATCACCTGCGCAGGGCCCTC | |
| | | TGGGGCTCAGCCCTGAGCTAGTGTCACCTGCACAGGGCCCTCT | |
| | | GAGGCTCAGCCCTGAGCTGGCGTCACCTGTGCAGGGCCCTCTG | |
| | | GGGCTCAGCCCTGAGCTGGCCTCACCTGGGTTCCCCACCCCGG | |
| | | GCTCTCCTGCCCTGCCCTCCTGCCCGCCCTCCCTCCTGCCTGC | |
| | | GCAGCTCCTTCCCTAGGCACCTCTGTGCTGCATCCCACCAGCC | |
| | | TGAGCAAGACGCCCTCTCGGGGCCTGTGCCGCACTAGCCTCCC | |
| | | TCTCCTCTGTCCCCATAGCTGGTTTTTCCCACCAATCCTCACC | |
| | | TAACAGTTACTTTACAATTAAACTCAAAGCAAGCTCTTCTCCT | |
| | | CAGCTTGGGGCAGCCATTGGCCTCTGTCTCGTTTTGGGAAACC | |
| | | AAGGTCAGGAGGCCGTTGCAGACATAAATCTCGGCGACTCGGC | |
| | | CCCGTCTCCTGAGGGTCCTGCTGGTGACCGGCCTGGACCTTGG | |
| | | CCCTACAGCCCTGGAGGCCGCTGCTGACCAGCACTGACCCCGA | |
| | | CCTCAGAGAGTACTCGCAGGGGCGCTGGCTGCACTCAAGACCC | |
| | | TCGAGATTAACGGTGCTAACCCCGTCTGCTCCTCCCTCCCGCA | |
| | | GAGACTGGGGCCTGGACTGGACATGAGAGCCCCTTGGTGCCAC | |
| | | AGAGGGCTGTGTCTTACTAGAAACAACGCAAACCTCTCCTTCC | |
| | | TCAGAATAGTGATGTGTTCGACGTTTTATCAAAGGCCCCCTTT | |
| | | CTATGTTCATGTTAGTTTTGCTCCTTCTGTGTTTTTTTCTGAA | |
| | | CCATATCCATGTTGCTGACTTTTCCAAATAAAGGTTTTCACTC | |
| | | CTCTC | |
| 3UTR-013 | Calr; | AGAGGCCTGCCTCCAGGGCTGGACTGAGGCCTGAGCGCTCCTG | 244 |
| | calreticulin | CCGCAGAGCTGGCCGCGCCAAATAATGTCTCTGTGAGACTCGA | |
| | | GAACTTTCATTTTTTTCCAGGCTGGTTCGGATTTGGGGTGGAT | |
| | | TTTGGTTTTGTTCCCCTCCTCCACTCTCCCCCACCCCCTCCCC | |
| | | GCCCTTTTTTTTTTTTTTTTTTAAACTGGTATTTTATCTTTGA | |
| | | TTCTCCTTCAGCCCTCACCCCTGGTTCTCATCTTTCTTGATCA | |
| | | ACATCTTTTCTTGCCTCTGTCCCCTTCTCTCATCTCTTAGCTC | |
| | | CCCTCCAACCTGGGGGGCAGTGGTGTGGAGAAGCCACAGGCCT | |
| | | GAGATTTCATCTGCTCTCCTTCCTGGAGCCCAGAGGAGGGCAG | |
| | | CAGAAGGGGGTGGTGTCTCCAACCCCCCAGCACTGAGGAAGAA | |
| | | CGGGGCTCTTCTCATTTCACCCCTCCCTTTCTCCCCTGCCCCC | |
| | | AGGACTGGGCCACTTCTGGGTGGGGCAGTGGGTCCCAGATTGG | |
| | | CTCACACTGAGAATGTAAGAACTACAAACAAAATTTCTATTAA | |
| | | ATTAAATTTTGTGTCTCC | |
| 3UTR-014 | Col1a1; | CTCCCTCCATCCCAACCTGGCTCCCTCCCACCCAACCAACTTT | 245 |
| | collagen, | CCCCCCAACCCGGAAACAGACAAGCAACCCAAACTGAACCCCC | |
| | type I, alpha 1 | TCAAAAGCCAAAAAATGGGAGACAATTTCACATGGACTTTGGA | |
| | | AAATATTTTTTTCCTTTGCATTCATCTCTCAAACTTAGTTTTT | |
| | | ATCTTTGACCAACCGAACATGACCAAAAACCAAAAGTGCATTC | |
| | | AACCTTACCAAAAAAAAAAAAAAAAAAAGAATAAATAAATAAC | |
| | | TTTTTAAAAAAGGAAGCTTGGTCCACTTGCTTGAAGACCCATG | |
| | | CGGGGGTAAGTCCCTTTCTGCCCGTTGGGCTTATGAAACCCCA | |
| | | ATGCTGCCCTTTCTGCTCCTTTCTCCACACCCCCCTTGGGGCC | |
| | | TCCCCTCCACTCCTTCCCAAATCTGTCTCCCCAGAAGACACAG | |
| | | GAAACAATGTATTGTCTGCCCAGCAATCAAAGGCAATGCTCAA | |
| | | ACACCCAAGTGGCCCCCACCCTCAGCCCGCTCCTGCCCGCCCA | |
| | | GCACCCCCAGGCCCTGGGGGACCTGGGGTTCTCAGACTGCCAA | |
| | | AGAAGCCTTGCCATCTGGCGCTCCCATGGCTCTTGCAACATCT | |
| | | CCCCTTCGTTTTTGAGGGGGTCATGCCGGGGGAGCCACCAGCC | |
| | | CCTCACTGGGTTCGGAGGAGAGTCAGGAAGGGCCACGACAAAG | |
| | | CAGAAACATCGGATTTGGGGAACGCGTGTCAATCCCTTGTGCC | |
| | | GCAGGGCTGGGCGGGAGAGACTGTTCTGTTCCTTGTGTAACTG | |
| | | TGTTGCTGAAAGACTACCTCGTTCTTGTCTTGATGTGTCACCG | |
| | | GGGCAACTGCCTGGGGGCGGGGATGGGGGCAGGGTGGAAGCGG | |
| | | CTCCCCATTTTATACCAAAGGTGCTACATCTATGTGATGGGTG | |
| | | GGGTGGGGAGGGAATCACTGGTGCTATAGAAATTGAGATGCCC | |
| | | CCCCAGGCCAGCAAATGTTCCTTTTTGTTCAAAGTCTATTTTT | |
| | | ATTCCTTGATATTTTTCTTTTTTTTTTTTTTTTTTTGTGGATG | |
| | | GGGACTTGTGAATTTTTCTAAAGGTGCTATTTAACATGGGAGG | |
| | | AGAGCGTGTGCGGCTCCAGCCCAGCCCGCTGCTCACTTTCCAC | |
| | | CCTCTCTCCACCTGCCTCTGGCTTCTCAGGCCTCTGCTCTCCG | |
| | | ACCTCTCTCCTCTGAAACCCTCCTCCACAGCTGCAGCCCATCC | |
| | | TCCCGGCTCCCTCCTAGTCTGTCCTGCGTCCTCTGTCCCCGGG | |
| | | TTTCAGAGACAACTTCCCAAAGCACAAAGCAGTTTTTCCCCCT | |
| | | AGGGGTGGGAGGAAGCAAAAGACTCTGTACCTATTTTGTATGT | |
| | | GTATAATAATTTGAGATGTTTTTAATTATTTTGATTGCTGGAA | |
| | | TAAAGCATGTGGAAATGACCCAAACATAATCCGCAGTGGCCTC | |
| | | CTAATTTCCTTCTTTGGAGTTGGGGGAGGGGTAGACATGGGGA | |
| | | AGGGGCTTTGGGGTGATGGGCTTGCCTTCCATTCCTGCCCTTT | |
| | | CCCTCCCCACTATTCTCTTCTAGATCCCTCCATAACCCCACTC | |
| | | CCCTTTCTCTCACCCTTCTTATACCGCAAACCTTTCTACTTCC | |
| | | TCTTTCATTTTCTATTCTTGCAATTTCCTTGCACCTTTTCCAA | |
| | | ATCCTCTTCTCCCCTGCAATACCATACAGGCAATCCACGTGCA | |
| | | CAACACACACACACACTCTTCACATCTGGGGTTGTCCAAACCT | |
| | | CATACCCACTCCCCTTCAAGCCCATCCACTCTCCACCCCCTGG | |
| | | ATGCCCTGCACTTGGTGGCGGTGGGATGCTCATGGATACTGGG | |
| | | AGGGTGAGGGGAGTGGAACCCGTGAGGAGGACCTGGGGGCCTC | |
| | | TCCTTGAACTGACATGAAGGGTCATCTGGCCTCTGCTCCCTTC | |
| | | TCACCCACGCTGACCTCCTGCCGAAGGAGCAACGCAACAGGAG | |
| | | AGGGGTCTGCTGAGCCTGGCGAGGGTCTGGGAGGGACCAGGAG | |
| | | GAAGGCGTGCTCCCTGCTCGCTGTCCTGGCCCTGGGGGAGTGA | |
| | | GGGAGACAGACACCTGGGAGAGCTGTGGGGAAGGCACTCGCAC | |
| | | CGTGCTCTTGGGAAGGAAGGAGACCTGGCCCTGCTCACCACGG | |
| | | ACTGGGTGCCTCGACCTCCTGAATCCCCAGAACACAACCCCCC | |
| | | TGGGCTGGGGTGGTCTGGGGAACCATCGTGCCCCCGCCTCCCG | |
| | | CCTACTCCTTTTTAAGCTT | |
| 3UTR-015 | Plod1; | TTGGCCAGGCCTGACCCTCTTGGACCTTTCTTCTTTGCCGACA | 246 |
| | procollagen- | ACCACTGCCCAGCAGCCTCTGGGACCTCGGGGTCCCAGGGAAC | |
| | lysine, 2- | CCAGTCCAGCCTCCTGGCTGTTGACTTCCCATTGCTCTTGGAG | |
| | oxoglutarate | CCACCAATCAAAGAGATTCAAAGAGATTCCTGCAGGCCAGAGG | |
| | 5- | CGGAACACACCTTTATGGCTGGGGCTCTCCGTGGTGTTCTGGA | |
| | dioxygenase 1 | CCCAGCCCCTGGAGACACCATTCACTTTTACTGCTTTGTAGTG | |
| | | ACTCGTGCTCTCCAACCTGTCTTCCTGAAAAACCAAGGCCCCC | |
| | | TTCCCCCACCTCTTCCATGGGGTGAGACTTGAGCAGAACAGGG | |
| | | GCTTCCCCAAGTTGCCCAGAAAGACTGTCTGGGTGAGAAGCCA | |
| | | TGGCCAGAGCTTCTCCCAGGCACAGGTGTTGCACCAGGGACTT | |
| | | CTGCTTCAAGTTTTGGGGTAAAGACACCTGGATCAGACTCCAA | |
| | | GGGCTGCCCTGAGTCTGGGACTTCTGCCTCCATGGCTGGTCAT | |
| | | GAGAGCAAACCGTAGTCCCCTGGAGACAGCGACTCCAGAGAAC | |
| | | CTCTTGGGAGACAGAAGAGGCATCTGTGCACAGCTCGATCTTC | |
| | | TACTTGCCTGTGGGGAGGGGAGTGACAGGTCCACACACCACAC | |
| | | TGGGTCACCCTGTCCTGGATGCCTCTGAAGAGAGGGACAGACC | |
| | | GTCAGAAACTGGAGAGTTTCTATTAAAGGTCATTTAAACCA | |
| 3UTR-016 | Nucb1; | TCCTCCGGGACCCCAGCCCTCAGGATTCCTGATGCTCCAAGGC | 247 |
| | nucleobindin 1 | GACTGATGGGCGCTGGATGAAGTGGCACAGTCAGCTTCCCTGG | |
| | | GGGCTGGTGTCATGTTGGGCTCCTGGGGCGGGGGCACGGCCTG | |
| | | GCATTTCACGCATTGCTGCCACCCCAGGTCCACCTGTCTCCAC | |
| | | TTTCACAGCCTCCAAGTCTGTGGCTCTTCCCTTCTGTCCTCCG | |
| | | AGGGGCTTGCCTTCTCTCGTGTCCAGTGAGGTGCTCAGTGATC | |
| | | GGCTTAACTTAGAGAAGCCCGCCCCCTCCCCTTCTCCGTCTGT | |
| | | CCCAAGAGGGTCTGCTCTGAGCCTGCGTTCCTAGGTGGCTCGG | |
| | | CCTCAGCTGCCTGGGTTGTGGCCGCCCTAGCATCCTGTATGCC | |
| | | CACAGCTACTGGAATCCCCGCTGCTGCTCCGGGCCAAGCTTCT | |
| | | GGTTGATTAATGAGGGCATGGGGTGGTCCCTCAAGACCTTCCC | |
| | | CTACCTTTTGTGGAACCAGTGATGCCTCAAAGACAGTGTCCCC | |
| | | TCCACAGCTGGGTGCCAGGGGCAGGGGATCCTCAGTATAGCCG | |
| | | GTGAACCCTGATACCAGGAGCCTGGGCCTCCCTGAACCCCTGG | |
| | | CTTCCAGCCATCTCATCGCCAGCCTCCTCCTGGACCTCTTGGC | |
| | | CCCCAGCCCCTTCCCCACACAGCCCCAGAAGGGTCCCAGAGCT | |
| | | GACCCCACTCCAGGACCTAGGCCCAGCCCCTCAGCCTCATCTG | |
| | | GAGCCCCTGAAGACCAGTCCCACCCACCTTTCTGGCCTCATCT | |
| | | GACACTGCTCCGCATCCTGCTGTGTGTCCTGTTCCATGTTCCG | |
| | | GTTCCATCCAAATACACTTTCTGGAACAAA | |
| 3UTR-017 | α-globin | GCTGGAGCCTCGGTGGCCATGCTTCTTGCCCCTTGGGCCTCCC | 248 |
| | | CCCAGCCCCTCCTCCCCTTCCTGCACCCGTACCCCCGTGGTCT | |
| | | TTGAATAAAGTCTGAGTGGGCGGC | |
| 3UTR-018 | | TGATAATAGGCTGGAGCCTCGGTGGCCATGCTTCTTGCCCCTT | 267 |
| | | GGGCCTCCCCCCAGCCCCTCCTCCCCTTCCTGCACCCGTACCC | |
| | | CCGTGGTCTTTGAATAAAGTCTGAGTGGGCGGC | |
| 3UTR-019 | | TGATAATAGTCCATAAAGTAGGAAACACTACAGCTGGAGCCTC | 773 |
| | | GGTGGCCATGCTTCTTGCCCCTTGGGCCTCCCCCCAGCCCCTC | |
| | | CTCCCCTTCCTGCACCCGTACCCCCCGCATTATTACTCACGGT | |
| | | ACGAGTGGTCTTTGAATAAAGTCTGAGTGGGCGGC | |
| 3UTR-020 | | TGATAATAGGCTGGAGCCTCGGTGGCCATGCTTCTTGCCCCTT | 774 |
| | | GGGCCTCCCCCCAGCCCCTCCTCCCCTTCCTGCACCCGTACCC | |
| | | CCCGCATTATTACTCACGGTACGAGTGGTCTTTGAATAAAGTC | |
| | | TGAGTGGGCGGC | |

[0494] In certain embodiments, the 3′ UTR useful for the polynucleotides comprises SEQ ID NO: 267.

[0495] In certain embodiments, the 5′UTR and/or 3′UTR sequence of the disclosure comprises a nucleotide sequence at least about 60%, at least about 70%, at least about 80%, at least about 90%, at least about 95%, at least about 96%, at least about 97%, at least about 98%, at least about 99%, or about 100% identical to a sequence selected from the group consisting of 5′UTR sequences comprising any of SEQ ID NOs: 215-231 and/or 3′UTR sequences comprises any of SEQ ID NOs: 232-248, and any combination thereof. The polynucleotides of the disclosure can comprise combinations of features. For example, the ORF can be flanked by a 5′UTR that comprises a strong Kozak translational initiation signal and/or a 3′UTR comprising an oligo(dT) sequence for templated addition of a poly-A tail. A 5′UTR can comprise a first polynucleotide fragment and a second polynucleotide fragment from the same and/or different UTRs (see, e.g., US2010/0293625, herein incorporated by reference in its entirety).

[0496] It is also within the scope of the present disclosure to have patterned UTRs. As used herein “patterned UTRs” include a repeating or alternating pattern, such as ABABAB or AABBAABBAABB or ABCABCABC or variants thereof repeated once, twice, or more than 3 times. In these patterns, each letter, A, B, or C represent a different UTR nucleic acid sequence.

[0497] Other non-UTR sequences can be used as regions or subregions within the polynucleotides of the disclosure. For example, introns or portions of intron sequences can be incorporated into the polynucleotides of the disclosure. Incorporation of intronic sequences can increase protein production as well as polynucleotide expression levels. In some embodiments, the polynucleotide of the disclosure comprises an internal ribosome entry site (IRES) instead of or in addition to a UTR (see, e.g., Yakubov et al., Biochem. Biophys. Res. Commun. 2010 394(1):189-193, the contents of which are incorporated herein by reference in their entirety). In some embodiments, the polynucleotide of the disclosure comprises 5′ and/or 3′ sequence associated with the 5′ and/or 3′ ends of rubella virus (RV) genomic RNA, respectively, or deletion derivatives thereof, including the 5′ proximal open reading frame of RV RNA encoding nonstructural proteins (e.g., see Pogue et al., J. Virol. 67(12):7106-7117, the contents of which are incorporated herein by reference in their entirety). Viral capsid sequences can also be used as a translational enhancer, e.g., the 5′ portion of a capsid sequence, (e.g., semliki forest virus and sindbis virus capsid RNAs as described in Sjoberg et al., Biotechnology (NY) 1994 12(11):1127-1131, and Frolov and Schlesinger J. Virol. 1996 70(2):1182-1190, the contents of each of which are incorporated herein by reference in their entirety). In some embodiments, the polynucleotide comprises an IRES instead of a 5′UTR sequence. In some embodiments, the polynucleotide comprises an ORF and a viral capsid sequence. In some embodiments, the polynucleotide comprises a synthetic 5′UTR in combination with a non-synthetic 3′UTR.

[0498] In some embodiments, the UTR can also include at least one translation enhancer polynucleotide, translation enhancer element, or translational enhancer elements (collectively, “TEE,” which refers to nucleic acid sequences that increase the amount of polypeptide or protein produced from a polynucleotide. As a non-limiting example, the TEE can include those described in US2009/0226470, incorporated herein by reference in its entirety, and others known in the art. As a non-limiting example, the TEE can be located between the transcription promoter and the start codon. In some embodiments, the 5′UTR comprises a TEE.

[0499] In one aspect, a TEE is a conserved element in a UTR that can promote translational activity of a nucleic acid such as, but not limited to, cap-dependent or cap-independent translation. The conservation of these sequences has been shown across 14 species including humans. See, e.g., Panek et al., “An evolutionary conserved pattern of 18S rRNA sequence complementarity to mRNA 5′UTRs and its implications for eukaryotic gene translation regulation,” Nucleic Acids Research 2013, doi:10.1093/nar/gkt548, incorporated herein by reference in its entirety.

[0500] In one non-limiting example, the TEE comprises the TEE sequence in the 5′-leader of the Gtx homeodomain protein. See Chappell et al., PNAS 2004 101:9590-9594, incorporated herein by reference in its entirety.

[0501] In another non-limiting example, the TEE comprises a TEE having one or more of the sequences of SEQ ID NOs: 1-35 in US2009/0226470, US2013/0177581, and WO2009/075886; SEQ ID NOs: 1-5 and 7-645 in WO2012/009644; and SEQ ID NO: 1 WO1999/024595, U.S. Pat. No. 6,310,197, and U.S. Pat. No. 6,849,405; the contents of each of which are incorporated herein by reference in their entirety.

[0502] In some embodiments, the TEE is an internal ribosome entry site (IRES), HCV-IRES, or an IRES element such as, but not limited to, those described in: U.S. Pat. No. 7,468,275, US2007/0048776, US2011/0124100, WO2007/025008, and WO2001/055369; the contents of each of which re incorporated herein by reference in their entirety. The IRES elements can include, but are not limited to, the Gtx sequences (e.g., Gtx9-nt, Gtx8-nt, Gtx7-nt) as described by Chappell et al., PNAS 2004 101:9590-9594, Zhou et al., PNAS 2005 102:6273-6278, US2007/0048776, US2011/0124100, and WO2007/025008; the contents of each of which are incorporated herein by reference in their entirety.

[0503] “Translational enhancer polynucleotide” or “translation enhancer polynucleotide sequence” refer to a polynucleotide that includes one or more of the TEE provided herein and/or known in the art (see. e.g., U.S. Pat. No. 6,310,197, U.S. Pat. No. 6,849,405, U.S. Pat. No. 7,456,273, U.S. Pat. No. 7,183,395, US2009/0226470, US2007/0048776, US2011/0124100, US2009/0093049, US2013/0177581, WO2009/075886, WO2007/025008, WO2012/009644, WO2001/055371, WO1999/024595, EP2610341A1, and EP2610340A1; the contents of each of which are incorporated herein by reference in their entirety), or their variants, homologs, or functional derivatives. In some embodiments, the polynucleotide of the disclosure comprises one or multiple copies of a TEE. The TEE in a translational enhancer polynucleotide can be organized in one or more sequence segments. A sequence segment can harbor one or more of the TEEs provided herein, with each TEE being present in one or more copies. When multiple sequence segments are present in a translational enhancer polynucleotide, they can be homogenous or heterogeneous. Thus, the multiple sequence segments in a translational enhancer polynucleotide can harbor identical or different types of the TEE provided herein, identical or different number of copies of each of the TEE, and/or identical or different organization of the TEE within each sequence segment. In one embodiment, the polynucleotide of the disclosure comprises a translational enhancer polynucleotide sequence.

[0504] In some embodiments, a 5′UTR and/or 3′UTR of a polynucleotide of the disclosure comprises at least one TEE or portion thereof that is disclosed in: WO1999/024595, WO2012/009644, WO2009/075886, WO2007/025008, WO1999/024595, WO2001/055371, EP2610341A1, EP2610340A1, U.S. Pat. No. 6,310,197, U.S. Pat. No. 6,849,405, U.S. Pat. No. 7,456,273, U.S. Pat. No. 7,183,395, US2009/0226470, US2011/0124100, US2007/0048776, US2009/0093049, or US2013/0177581, the contents of each are incorporated herein by reference in their entirety.

[0505] In some embodiments, a 5′UTR and/or 3′UTR of a polynucleotide of the disclosure comprises a TEE that is at least 5%, at least 10%, at least 15%, at least 20%, at least 25%, at least 30%, at least 35%, at least 40%, at least 45%, at least 50%, at least 55%, at least 60%, at least 65%, at least 70%, at least 75%, at least 80%, at least 85%, at least 90%, at least 95%, at least 96%, at least 97%, at least 98%, at least 99%, or 100% identical to a TEE disclosed in: US2009/0226470, US2007/0048776, US2013/0177581, US2011/0124100, WO1999/024595, WO2012/009644, WO2009/075886, WO2007/025008, EP2610341A1, EP2610340A1, U.S. Pat. No. 6,310,197, U.S. Pat. No. 6,849,405, U.S. Pat. No. 7,456,273, U.S. Pat. No. 7,183,395, Chappell et al., PNAS 2004 101:9590-9594, Zhou et al., PNAS 2005 102:6273-6278, and Supplemental Table 1 and in Supplemental Table 2 of Wellensiek et al., “Genome-wide profiling of human cap-independent translation-enhancing elements,” Nature Methods 2013, DOI:10.1038/NMETH.2522; the contents of each of which are incorporated herein by reference in their entirety.

[0506] In some embodiments, a 5′UTR and/or 3′UTR of a polynucleotide of the disclosure comprises a TEE which is selected from a 5-30 nucleotide fragment, a 5-25 nucleotide fragment, a 5-20 nucleotide fragment, a 5-15 nucleotide fragment, or a 5-10 nucleotide fragment (including a fragment of 5, 6, 7, 8, 9, 10, 11, 12, 13, 14, 15, 16, 17, 18, 19, 20, 21, 22, 23, 24, 25, 26, 27, 28, 29, or 30 nucleotides) of a TEE sequence disclosed in: US2009/0226470, US2007/0048776, US2013/0177581, US2011/0124100, WO1999/024595, WO2012/009644, WO2009/075886, WO2007/025008, EP2610341A1, EP2610340A1, U.S. Pat. No. 6,310,197, U.S. Pat. No. 6,849,405, U.S. Pat. No. 7,456,273, U.S. Pat. No. 7,183,395, Chappell et al., PNAS 2004 101:9590-9594, Zhou et al., PNAS 2005 102:6273-6278, and Supplemental Table 1 and in Supplemental Table 2 of Wellensiek et al., “Genome-wide profiling of human cap-independent translation-enhancing elements,” Nature Methods 2013, DOI:10.1038/NMETH.2522.

[0507] In some embodiments, a 5′UTR and/or 3′UTR of a polynucleotide of the disclosure comprises a TEE which is a transcription regulatory element described in any of U.S. Pat. No. 7,456,273, U.S. Pat. No. 7,183,395, US2009/0093049, and WO2001/055371, the contents of each of which are incorporated herein by reference in their entirety. The transcription regulatory elements can be identified by methods known in the art, such as, but not limited to, the methods described in U.S. Pat. No. 7,456,273, U.S. Pat. No. 7,183,395, US2009/0093049, and WO2001/055371.

[0508] In some embodiments, a 5′UTR and/or 3′UTR comprising at least one TEE described herein can be incorporated in a monocistronic sequence such as, but not limited to, a vector system or a nucleic acid vector. As non-limiting examples, the vector systems and nucleic acid vectors can include those described in U.S. Pat. No. 7,456,273, U.S. Pat. No. 7,183,395, US2007/0048776, US2009/0093049, US2011/0124100, WO2007/025008, and WO2001/055371.

[0509] In some embodiments, a 5′UTR and/or 3′UTR of a polynucleotide of the disclosure comprises a TEE or portion thereof described herein. In some embodiments, the TEEs in the 3′UTR can be the same and/or different from the TEE located in the 5′UTR.

[0510] In some embodiments, a 5′UTR and/or 3′UTR of a polynucleotide of the disclosure can include at least 1, at least 2, at least 3, at least 4, at least 5, at least 6, at least 7, at least 8, at least 9, at least 10, at least 11, at least 12, at least 13, at least 14, at least 15, at least 16, at least 17, at least 18 at least 19, at least 20, at least 21, at least 22, at least 23, at least 24, at least 25, at least 30, at least 35, at least 40, at least 45, at least 50, at least 55 or more than 60 TEE sequences. In one embodiment, the 5′UTR of a polynucleotide of the disclosure can include 1-60, 1-55, 1-50, 1-45, 1-40, 1-35, 1-30, 1-25, 1-20, 1-15, 1-10, 9, 8, 7, 6, 5, 4, 3, 2, or 1 TEE sequences. The TEE sequences in the 5′UTR of the polynucleotide of the disclosure can be the same or different TEE sequences. A combination of different TEE sequences in the 5′UTR of the polynucleotide of the disclosure can include combinations in which more than one copy of any of the different TEE sequences are incorporated. The TEE sequences can be in a pattern such as ABABAB or AABBAABBAABB or ABCABCABC or variants thereof repeated one, two, three, or more than three times. In these patterns, each letter, A, B, or C represent a different TEE nucleotide sequence.

[0511] In some embodiments, the TEE can be identified by the methods described in US2007/0048776, US2011/0124100, WO2007/025008, WO2012/009644, the contents of each of which are incorporated herein by reference in their entirety.

[0512] In some embodiments, the 5′UTR and/or 3′UTR comprises a spacer to separate two TEE sequences. As a non-limiting example, the spacer can be a 15 nucleotide spacer and/or other spacers known in the art. As another non-limiting example, the 5′UTR and/or 3′UTR comprises a TEE sequence-spacer module repeated at least once, at least twice, at least 3 times, at least 4 times, at least 5 times, at least 6 times, at least 7 times, at least 8 times, at least 9 times, at least 10 times, or more than 10 times in the 5′UTR and/or 3′UTR, respectively. In some embodiments, the 5′UTR and/or 3′UTR comprises a TEE sequence-spacer module repeated 1, 2, 3, 4, 5, 6, 7, 8, 9, or 10 times.

[0513] In some embodiments, the spacer separating two TEE sequences can include other sequences known in the art that can regulate the translation of the polynucleotide of the disclosure, e.g., miR sequences described herein (e.g., miR binding sites and miR seeds). As a non-limiting example, each spacer used to separate two TEE sequences can include a different miR sequence or component of a miR sequence (e.g., miR seed sequence).

[0514] In some embodiments, a polynucleotide of the disclosure comprises a miR and/or TEE sequence. In some embodiments, the incorporation of a miR sequence and/or a TEE sequence into a polynucleotide of the disclosure can change the shape of the stem loop region, which can increase and/or decrease translation. See e.g., Kedde et al., Nature Cell Biology 2010 12(10):1014-20, herein incorporated by reference in its entirety).

Sensor Sequences and MicroRNA (miRNA) Binding Sites

[0515] Polynucleotides of the disclosure can include regulatory elements, for example, microRNA (miRNA) binding sites, transcription factor binding sites, structured mRNA sequences and/or motifs, artificial binding sites engineered to act as pseudo-receptors for endogenous nucleic acid binding molecules, and combinations thereof. In some embodiments, polynucleotides including such regulatory elements are referred to as including “sensor sequences”. Non-limiting examples of sensor sequences are described in U.S. Publication 2014/0200261, the contents of which are incorporated herein by reference in their entirety.

[0516] In some embodiments, a polynucleotide (e.g., a ribonucleic acid (RNA), e.g., a messenger RNA (mRNA)) of the disclosure comprises an open reading frame (ORF) encoding a polypeptide of interest and further comprises one or more miRNA binding site(s). Inclusion or incorporation of miRNA binding site(s) provides for regulation of polynucleotides of the disclosure, and in turn, of the polypeptides encoded therefrom, based on tissue-specific and/or cell-type specific expression of naturally-occurring miRNAs.

[0517] A miRNA, e.g., a natural-occurring miRNA, is a 19-25 nucleotide long noncoding RNA that binds to a polynucleotide and down-regulates gene expression either by reducing stability or by inhibiting translation of the polynucleotide. A miRNA sequence comprises a “seed” region, i.e., a sequence in the region of positions 2-8 of the mature miRNA. A miRNA seed can comprise positions 2-8 or 2-7 of the mature miRNA. In some embodiments, a miRNA seed can comprise 7 nucleotides (e.g., nucleotides 2-8 of the mature miRNA), wherein the seed-complementary site in the corresponding miRNA binding site is flanked by an adenosine (A) opposed to miRNA position 1. In some embodiments, a miRNA seed can comprise 6 nucleotides (e.g., nucleotides 2-7 of the mature miRNA), wherein the seed-complementary site in the corresponding miRNA binding site is flanked by an adenosine (A) opposed to miRNA position 1. See, for example, Grimson A, Farh K K, Johnston W K, Garrett-Engele P, Lim L P, Bartel D P; Mol Cell. 2007 Jul. 6; 27(1):91-105. miRNA profiling of the target cells or tissues can be conducted to determine the presence or absence of miRNA in the cells or tissues. In some embodiments, a polynucleotide (e.g., a ribonucleic acid (RNA), e.g., a messenger RNA (mRNA)) of the disclosure comprises one or more microRNA binding sites, microRNA target sequences, microRNA complementary sequences, or microRNA seed complementary sequences. Such sequences can correspond to, e.g., have complementarity to, any known microRNA such as those taught in US Publication US2005/0261218 and US Publication US2005/0059005, the contents of each of which are incorporated herein by reference in their entirety.

[0518] As used herein, the term “microRNA (miRNA or miR) binding site” refers to a sequence within a polynucleotide, e.g., within a DNA or within an RNA transcript, including in the 5′UTR and/or 3′UTR, that has sufficient complementarity to all or a region of a miRNA to interact with, associate with or bind to the miRNA. In some embodiments, a polynucleotide of the disclosure comprising an ORF encoding a polypeptide of interest and further comprises one or more miRNA binding site(s). In exemplary embodiments, a 5′UTR and/or 3′UTR of the polynucleotide (e.g., a ribonucleic acid (RNA), e.g., a messenger RNA (mRNA)) comprises the one or more miRNA binding site(s).

[0519] A miRNA binding site having sufficient complementarity to a miRNA refers to a degree of complementarity sufficient to facilitate miRNA-mediated regulation of a polynucleotide, e.g., miRNA-mediated translational repression or degradation of the polynucleotide. In exemplary aspects of the disclosure, a miRNA binding site having sufficient complementarity to the miRNA refers to a degree of complementarity sufficient to facilitate miRNA-mediated degradation of the polynucleotide, e.g., miRNA-guided RNA-induced silencing complex (RISC)-mediated cleavage of mRNA. The miRNA binding site can have complementarity to, for example, a 19-25 nucleotide miRNA sequence, to a 19-23 nucleotide miRNA sequence, or to a 22 nucleotide miRNA sequence. A miRNA binding site can be complementary to only a portion of a miRNA, e.g., to a portion less than 1, 2, 3, or 4 nucleotides of the full length of a naturally-occurring miRNA sequence. Full or complete complementarity (e.g., full complementarity or complete complementarity over all or a significant portion of the length of a naturally-occurring miRNA) is preferred when the desired regulation is mRNA degradation.

[0520] In some embodiments, a miRNA binding site includes a sequence that has complementarity (e.g., partial or complete complementarity) with an miRNA seed sequence. In some embodiments, the miRNA binding site includes a sequence that has complete complementarity with a miRNA seed sequence. In some embodiments, a miRNA binding site includes a sequence that has complementarity (e.g., partial or complete complementarity) with an miRNA sequence. In some embodiments, the miRNA binding site includes a sequence that has complete complementarity with a miRNA sequence. In some embodiments, a miRNA binding site has complete complementarity with a miRNA sequence but for 1, 2, or 3 nucleotide substitutions, terminal additions, and/or truncations.

[0521] In some embodiments, the miRNA binding site is the same length as the corresponding miRNA. In other embodiments, the miRNA binding site is one, two, three, four, five, six, seven, eight, nine, ten, eleven or twelve nucleotide(s) shorter than the corresponding miRNA at the 5′ terminus, the 3′ terminus, or both. In still other embodiments, the microRNA binding site is two nucleotides shorter than the corresponding microRNA at the 5′ terminus, the 3′ terminus, or both. The miRNA binding sites that are shorter than the corresponding miRNAs are still capable of degrading the mRNA incorporating one or more of the miRNA binding sites or preventing the mRNA from translation.

[0522] In some embodiments, the miRNA binding site binds the corresponding mature miRNA that is part of an active RISC containing Dicer. In another embodiment, binding of the miRNA binding site to the corresponding miRNA in RISC degrades the mRNA containing the miRNA binding site or prevents the mRNA from being translated. In some embodiments, the miRNA binding site has sufficient complementarity to miRNA so that a RISC complex comprising the miRNA cleaves the polynucleotide comprising the miRNA binding site. In other embodiments, the miRNA binding site has imperfect complementarity so that a RISC complex comprising the miRNA induces instability in the polynucleotide comprising the miRNA binding site. In another embodiment, the miRNA binding site has imperfect complementarity so that a RISC complex comprising the miRNA represses transcription of the polynucleotide comprising the miRNA binding site.

[0523] In some embodiments, the miRNA binding site has one, two, three, four, five, six, seven, eight, nine, ten, eleven or twelve mismatch(es) from the corresponding miRNA.

[0524] In some embodiments, the miRNA binding site has at least about ten, at least about eleven, at least about twelve, at least about thirteen, at least about fourteen, at least about fifteen, at least about sixteen, at least about seventeen, at least about eighteen, at least about nineteen, at least about twenty, or at least about twenty-one contiguous nucleotides complementary to at least about ten, at least about eleven, at least about twelve, at least about thirteen, at least about fourteen, at least about fifteen, at least about sixteen, at least about seventeen, at least about eighteen, at least about nineteen, at least about twenty, or at least about twenty-one, respectively, contiguous nucleotides of the corresponding miRNA.

[0525] By engineering one or more miRNA binding sites into a polynucleotide of the disclosure, the polynucleotide can be targeted for degradation or reduced translation, provided the miRNA in question is available. This can reduce off-target effects upon delivery of the polynucleotide. For example, if a polynucleotide of the disclosure is not intended to be delivered to a tissue or cell but ends up is said tissue or cell, then a miRNA abundant in the tissue or cell can inhibit the expression of the gene of interest if one or multiple binding sites of the miRNA are engineered into the 5′UTR and/or 3′UTR of the polynucleotide.

[0526] Conversely, miRNA binding sites can be removed from polynucleotide sequences in which they naturally occur in order to increase protein expression in specific tissues. For example, a binding site for a specific miRNA can be removed from a polynucleotide to improve protein expression in tissues or cells containing the miRNA.

[0527] In one embodiment, a polynucleotide of the disclosure can include at least one miRNA-binding site in the 5′UTR and/or 3′UTR in order to regulate cytotoxic or cytoprotective mRNA therapeutics to specific cells such as, but not limited to, normal and/or cancerous cells. In another embodiment, a polynucleotide of the disclosure can include two, three, four, five, six, seven, eight, nine, ten, or more miRNA-binding sites in the 5′-UTR and/or 3′-UTR in order to regulate cytotoxic or cytoprotective mRNA therapeutics to specific cells such as, but not limited to, normal and/or cancerous cells.

[0528] Regulation of expression in multiple tissues can be accomplished through introduction or removal of one or more miRNA binding sites, e.g., one or more distinct miRNA binding sites. The decision whether to remove or insert a miRNA binding site can be made based on miRNA expression patterns and/or their profilings in tissues and/or cells in development and/or disease. Identification of miRNAs, miRNA binding sites, and their expression patterns and role in biology have been reported (e.g., Bonauer et al., Curr Drug Targets 2010 11:943-949; Anand and Cheresh Curr Opin Hematol 2011 18:171-176; Contreras and Rao Leukemia 2012 26:404-413 (2011 Dec. 20. doi: 10.1038/leu.2011.356); Bartel Cell 2009 136:215-233; Landgraf et al, Cell, 2007 129:1401-1414; Gentner and Naldini, Tissue Antigens. 2012 80:393-403 and all references therein; each of which is incorporated herein by reference in its entirety).

[0529] miRNAs and miRNA binding sites can correspond to any known sequence, including non-limiting examples described in U.S. Publication Nos. 2014/0200261, 2005/0261218, and 2005/0059005, each of which are incorporated herein by reference in their entirety.

[0530] Examples of tissues where miRNA are known to regulate mRNA, and thereby protein expression, include, but are not limited to, liver (miR-122), muscle (miR-133, miR-206, miR-208), endothelial cells (miR-17-92, miR-126), myeloid cells (miR-142-3p, miR-142-5p, miR-16, miR-21, miR-223, miR-24, miR-27), adipose tissue (let-7, miR-30c), heart (miR-1d, miR-149), kidney (miR-192, miR-194, miR-204), and lung epithelial cells (let-7, miR-133, miR-126).

[0531] Specifically, miRNAs are known to be differentially expressed in immune cells (also called hematopoietic cells), such as antigen presenting cells (APCs) (e.g., dendritic cells and macrophages), macrophages, monocytes, B lymphocytes, T lymphocytes, granulocytes, natural killer cells, etc. Immune cell specific miRNAs are involved in immunogenicity, autoimmunity, the immune-response to infection, inflammation, as well as unwanted immune response after gene therapy and tissue/organ transplantation. Immune cells specific miRNAs also regulate many aspects of development, proliferation, differentiation and apoptosis of hematopoietic cells (immune cells). For example, miR-142 and miR-146 are exclusively expressed in immune cells, particularly abundant in myeloid dendritic cells. It has been demonstrated that the immune response to a polynucleotide can be shut-off by adding miR-142 binding sites to the 3′-UTR of the polynucleotide, enabling more stable gene transfer in tissues and cells. miR-142 efficiently degrades exogenous polynucleotides in antigen presenting cells and suppresses cytotoxic elimination of transduced cells (e.g., Annoni A et al., blood, 2009, 114, 5152-5161; Brown B D, et al., Nat med. 2006, 12(5), 585-591; Brown B D, et al., blood, 2007, 110(13): 4144-4152, each of which is incorporated herein by reference in its entirety).

[0532] An antigen-mediated immune response can refer to an immune response triggered by foreign antigens, which, when entering an organism, are processed by the antigen presenting cells and displayed on the surface of the antigen presenting cells. T cells can recognize the presented antigen and induce a cytotoxic elimination of cells that express the antigen.

[0533] Introducing a miR-142 binding site into the 5′UTR and/or 3′UTR of a polynucleotide of the disclosure can selectively repress gene expression in antigen presenting cells through miR-142 mediated degradation, limiting antigen presentation in antigen presenting cells (e.g., dendritic cells) and thereby preventing antigen-mediated immune response after the delivery of the polynucleotide. The polynucleotide is then stably expressed in target tissues or cells without triggering cytotoxic elimination.

[0534] In one embodiment, binding sites for miRNAs that are known to be expressed in immune cells, in particular, antigen presenting cells, can be engineered into a polynucleotide of the disclosure to suppress the expression of the polynucleotide in antigen presenting cells through miRNA mediated RNA degradation, subduing the antigen-mediated immune response. Expression of the polynucleotide is maintained in non-immune cells where the immune cell specific miRNAs are not expressed. For example, in some embodiments, to prevent an immunogenic reaction against a liver specific protein, any miR-122 binding site can be removed and a miR-142 (and/or mirR-146) binding site can be engineered into the 5′UTR and/or 3′UTR of a polynucleotide of the disclosure.

[0535] To further drive the selective degradation and suppression in APCs and macrophage, a polynucleotide of the disclosure can include a further negative regulatory element in the 5′UTR and/or 3′UTR, either alone or in combination with miR-142 and/or miR-146 binding sites. As a non-limiting example, the further negative regulatory element is a Constitutive Decay Element (CDE).

[0536] Immune cell specific miRNAs include, but are not limited to, hsa-let-7a-2-3p, hsa-let-7a-3p, hsa-7a-5p, hsa-let-7c, hsa-let-7e-3p, hsa-let-7e-5p, hsa-let-7g-3p, hsa-let-7g-5p, hsa-let-7i-3p, hsa-let-7i-5p, miR-10a-3p, miR-10a-5p, miR-1184, hsa-let-7f-1-3p, hsa-let-7f-2-5p, hsa-let-7f-5p, miR-125b-1-3p, miR-125b-2-3p, miR-125b-5p, miR-1279, miR-130a-3p, miR-130a-5p, miR-132-3p, miR-132-5p, miR-142-3p, miR-142-5p, miR-143-3p, miR-143-5p, miR-146a-3p, miR-146a-5p, miR-146b-3p, miR-146b-5p, miR-147a, miR-147b, miR-148a-5p, miR-148a-3p, miR-150-3p, miR-150-5p, miR-151b, miR-155-3p, miR-155-5p, miR-15a-3p, miR-15a-5p, miR-15b-5p, miR-15b-3p, miR-16-1-3p, miR-16-2-3p, miR-16-5p, miR-17-5p, miR-181a-3p, miR-181a-5p, miR-181a-2-3p, miR-182-3p, miR-182-5p, miR-197-3p, miR-197-5p, miR-21-5p, miR-21-3p, miR-214-3p, miR-214-5p, miR-223-3p, miR-223-5p, miR-221-3p, miR-221-5p, miR-23b-3p, miR-23b-5p, miR-24-1-5p, miR-24-2-5p, miR-24-3p, miR-26a-1-3p, miR-26a-2-3p, miR-26a-5p, miR-26b-3p, miR-26b-5p, miR-27a-3p, miR-27a-5p, miR-27b-3p, miR-27b-5p, miR-28-3p, miR-28-5p, miR-2909, miR-29a-3p, miR-29a-5p, miR-29b-1-5p, miR-29b-2-5p, miR-29c-3p, miR-29c-5p, miR-30e-3p, miR-30e-5p, miR-331-5p, miR-339-3p, miR-339-5p, miR-345-3p, miR-345-5p, miR-346, miR-34a-3p, miR-34a-5p, miR-363-3p, miR-363-5p, miR-372, miR-377-3p, miR-377-5p, miR-493-3p, miR-493-5p, miR-542, miR-548b-5p, miR548c-5p, miR-548i, miR-548j, miR-548n, miR-574-3p, miR-598, miR-718, miR-935, miR-99a-3p, miR-99a-5p, miR-99b-3p, and miR-99b-5p. Furthermore, novel miRNAs can be identified in immune cell through micro-array hybridization and microtome analysis (e.g., Jima D D et al, Blood, 2010, 116:e118-e127; Vaz C et al., BMC Genomics, 2010, 11,288, the content of each of which is incorporated herein by reference in its entirety.)

[0537] miRNAs that are known to be expressed in the liver include, but are not limited to, miR-107, miR-122-3p, miR-122-5p, miR-1228-3p, miR-1228-5p, miR-1249, miR-129-5p, miR-1303, miR-151a-3p, miR-151a-5p, miR-152, miR-194-3p, miR-194-5p, miR-199a-3p, miR-199a-5p, miR-199b-3p, miR-199b-5p, miR-296-5p, miR-557, miR-581, miR-939-3p, and miR-939-5p. MiRNA binding sites from any liver specific miRNA can be introduced to or removed from a polynucleotide of the disclosure to regulate expression of the polynucleotide in the liver. Liver specific miRNA binding sites can be engineered alone or further in combination with immune cell (e.g., APC) miRNA binding sites in a polynucleotide of the disclosure.

[0538] miRNAs that are known to be expressed in the lung include, but are not limited to, let-7a-2-3p, let-7a-3p, let-7a-5p, miR-126-3p, miR-126-5p, miR-127-3p, miR-127-5p, miR-130a-3p, miR-130a-5p, miR-130b-3p, miR-130b-5p, miR-133a, miR-133b, miR-134, miR-18a-3p, miR-18a-5p, miR-18b-3p, miR-18b-5p, miR-24-1-5p, miR-24-2-5p, miR-24-3p, miR-296-3p, miR-296-5p, miR-32-3p, miR-337-3p, miR-337-5p, miR-381-3p, and miR-381-5p. miRNA binding sites from any lung specific miRNA can be introduced to or removed from a polynucleotide of the disclosure to regulate expression of the polynucleotide in the lung. Lung specific miRNA binding sites can be engineered alone or further in combination with immune cell (e.g., APC) miRNA binding sites in a polynucleotide of the disclosure.

[0539] miRNAs that are known to be expressed in the heart include, but are not limited to, miR-1, miR-133a, miR-133b, miR-149-3p, miR-149-5p, miR-186-3p, miR-186-5p, miR-208a, miR-208b, miR-210, miR-296-3p, miR-320, miR-451a, miR-451b, miR-499a-3p, miR-499a-5p, miR-499b-3p, miR-499b-5p, miR-744-3p, miR-744-5p, miR-92b-3p, and miR-92b-5p. mMiRNA binding sites from any heart specific microRNA can be introduced to or removed from a polynucleotide of the disclosure to regulate expression of the polynucleotide in the heart. Heart specific miRNA binding sites can be engineered alone or further in combination with immune cell (e.g., APC) miRNA binding sites in a polynucleotide of the disclosure.

[0540] miRNAs that are known to be expressed in the nervous system include, but are not limited to, miR-124-5p, miR-125a-3p, miR-125a-5p, miR-125b-1-3p, miR-125b-2-3p, miR-125b-5p, miR-1271-3p, miR-1271-5p, miR-128, miR-132-5p, miR-135a-3p, miR-135a-5p, miR-135b-3p, miR-135b-5p, miR-137, miR-139-5p, miR-139-3p, miR-149-3p, miR-149-5p, miR-153, miR-181c-3p, miR-181c-5p, miR-183-3p, miR-183-5p, miR-190a, miR-190b, miR-212-3p, miR-212-5p, miR-219-1-3p, miR-219-2-3p, miR-23a-3p, miR-23a-5p, miR-30a-5p, miR-30b-3p, miR-30b-5p, miR-30c-1-3p, miR-30c-2-3p, miR-30c-5p, miR-30d-3p, miR-30d-5p, miR-329, miR-342-3p, miR-3665, miR-3666, miR-380-3p, miR-380-5p, miR-383, miR-410, miR-425-3p, miR-425-5p, miR-454-3p, miR-454-5p, miR-483, miR-510, miR-516a-3p, miR-548b-5p, miR-548c-5p, miR-571, miR-7-1-3p, miR-7-2-3p, miR-7-5p, miR-802, miR-922, miR-9-3p, and miR-9-5p. miRNAs enriched in the nervous system further include those specifically expressed in neurons, including, but not limited to, miR-132-3p, miR-132-3p, miR-148b-3p, miR-148b-5p, miR-151a-3p, miR-151a-5p, miR-212-3p, miR-212-5p, miR-320b, miR-320e, miR-323a-3p, miR-323a-5p, miR-324-5p, miR-325, miR-326, miR-328, miR-922 and those specifically expressed in glial cells, including, but not limited to, miR-1250, miR-219-1-3p, miR-219-2-3p, miR-219-5p, miR-23a-3p, miR-23a-5p, miR-3065-3p, miR-3065-5p, miR-30e-3p, miR-30e-5p, miR-32-5p, miR-338-5p, and miR-657. miRNA binding sites from any CNS specific miRNA can be introduced to or removed from a polynucleotide of the disclosure to regulate expression of the polynucleotide in the nervous system. Nervous system specific miRNA binding sites can be engineered alone or further in combination with immune cell (e.g., APC) miRNA binding sites in a polynucleotide of the disclosure.

[0541] miRNAs that are known to be expressed in the pancreas include, but are not limited to, miR-105-3p, miR-105-5p, miR-184, miR-195-3p, miR-195-5p, miR-196a-3p, miR-196a-5p, miR-214-3p, miR-214-5p, miR-216a-3p, miR-216a-5p, miR-30a-3p, miR-33a-3p, miR-33a-5p, miR-375, miR-7-1-3p, miR-7-2-3p, miR-493-3p, miR-493-5p, and miR-944. MiRNA binding sites from any pancreas specific miRNA can be introduced to or removed from a polynucleotide of the disclosure to regulate expression of the polynucleotide in the pancreas. Pancreas specific miRNA binding sites can be engineered alone or further in combination with immune cell (e.g. APC) miRNA binding sites in a polynucleotide of the disclosure.

[0542] miRNAs that are known to be expressed in the kidney include, but are not limited to, miR-122-3p, miR-145-5p, miR-17-5p, miR-192-3p, miR-192-5p, miR-194-3p, miR-194-5p, miR-20a-3p, miR-20a-5p, miR-204-3p, miR-204-5p, miR-210, miR-216a-3p, miR-216a-5p, miR-296-3p, miR-30a-3p, miR-30a-5p, miR-30b-3p, miR-30b-5p, miR-30c-1-3p, miR-30c-2-3p, miR30c-5p, miR-324-3p, miR-335-3p, miR-335-5p, miR-363-3p, miR-363-5p, and miR-562. miRNA binding sites from any kidney specific miRNA can be introduced to or removed from a polynucleotide of the disclosure to regulate expression of the polynucleotide in the kidney. Kidney specific miRNA binding sites can be engineered alone or further in combination with immune cell (e.g., APC) miRNA binding sites in a polynucleotide of the disclosure.

[0543] miRNAs that are known to be expressed in the muscle include, but are not limited to, let-7g-3p, let-7g-5p, miR-1, miR-1286, miR-133a, miR-133b, miR-140-3p, miR-143-3p, miR-143-5p, miR-145-3p, miR-145-5p, miR-188-3p, miR-188-5p, miR-206, miR-208a, miR-208b, miR-25-3p, and miR-25-5p. MiRNA binding sites from any muscle specific miRNA can be introduced to or removed from a polynucleotide of the disclosure to regulate expression of the polynucleotide in the muscle. Muscle specific miRNA binding sites can be engineered alone or further in combination with immune cell (e.g., APC) miRNA binding sites in a polynucleotide of the disclosure.

[0544] miRNAs are also differentially expressed in different types of cells, such as, but not limited to, endothelial cells, epithelial cells, and adipocytes.

[0545] miRNAs that are known to be expressed in endothelial cells include, but are not limited to, let-7b-3p, let-7b-5p, miR-100-3p, miR-100-5p, miR-101-3p, miR-101-5p, miR-126-3p, miR-126-5p, miR-1236-3p, miR-1236-5p, miR-130a-3p, miR-130a-5p, miR-17-5p, miR-17-3p, miR-18a-3p, miR-18a-5p, miR-19a-3p, miR-19a-5p, miR-19b-1-5p, miR-19b-2-5p, miR-19b-3p, miR-20a-3p, miR-20a-5p, miR-217, miR-210, miR-21-3p, miR-21-5p, miR-221-3p, miR-221-5p, miR-222-3p, miR-222-5p, miR-23a-3p, miR-23a-5p, miR-296-5p, miR-361-3p, miR-361-5p, miR-421, miR-424-3p, miR-424-5p, miR-513a-5p, miR-92a-1-5p, miR-92a-2-5p, miR-92a-3p, miR-92b-3p, and miR-92b-5p. Many novel miRNAs are discovered in endothelial cells from deep-sequencing analysis (e.g., Voellenkle C et al., RNA, 2012, 18, 472-484, herein incorporated by reference in its entirety). miRNA binding sites from any endothelial cell specific miRNA can be introduced to or removed from a polynucleotide of the disclosure to regulate expression of the polynucleotide in the endothelial cells.

[0546] miRNAs that are known to be expressed in epithelial cells include, but are not limited to, let-7b-3p, let-7b-5p, miR-1246, miR-200a-3p, miR-200a-5p, miR-200b-3p, miR-200b-5p, miR-200c-3p, miR-200c-5p, miR-338-3p, miR-429, miR-451a, miR-451b, miR-494, miR-802 and miR-34a, miR-34b-5p, miR-34c-5p, miR-449a, miR-449b-3p, miR-449b-5p specific in respiratory ciliated epithelial cells, let-7 family, miR-133a, miR-133b, miR-126 specific in lung epithelial cells, miR-382-3p, miR-382-5p specific in renal epithelial cells, and miR-762 specific in corneal epithelial cells. miRNA binding sites from any epithelial cell specific miRNA can be introduced to or removed from a polynucleotide of the disclosure to regulate expression of the polynucleotide in the epithelial cells.

[0547] In addition, a large group of miRNAs are enriched in embryonic stem cells, controlling stem cell self-renewal as well as the development and/or differentiation of various cell lineages, such as neural cells, cardiac, hematopoietic cells, skin cells, osteogenic cells and muscle cells (e.g., Kuppusamy K T et al., Curr. Mol Med, 2013, 13(5), 757-764; Vidigal J A and Ventura A, Semin Cancer Biol. 2012, 22(5-6), 428-436; Goff L A et al., PLoS One, 2009, 4:e7192; Morin R D et al., Genome Res, 2008, 18, 610-621; Yoo J K et al., Stem Cells Dev. 2012, 21(11), 2049-2057, each of which is herein incorporated by reference in its entirety). MiRNAs abundant in embryonic stem cells include, but are not limited to, let-7a-2-3p, let-a-3p, let-7a-5p, let7d-3p, let-7d-5p, miR-103a-2-3p, miR-103a-5p, miR-106b-3p, miR-106b-5p, miR-1246, miR-1275, miR-138-1-3p, miR-138-2-3p, miR-138-5p, miR-154-3p, miR-154-5p, miR-200c-3p, miR-200c-5p, miR-290, miR-301a-3p, miR-301a-5p, miR-302a-3p, miR-302a-5p, miR-302b-3p, miR-302b-5p, miR-302c-3p, miR-302c-5p, miR-302d-3p, miR-302d-5p, miR-302e, miR-367-3p, miR-367-5p, miR-369-3p, miR-369-5p, miR-370, miR-371, miR-373, miR-380-5p, miR-423-3p, miR-423-5p, miR-486-5p, miR-520c-3p, miR-548e, miR-548f, miR-548g-3p, miR-548g-5p, miR-548i, miR-548k, miR-5481, miR-548m, miR-548n, miR-548o-3p, miR-548o-5p, miR-548p, miR-664a-3p, miR-664a-5p, miR-664b-3p, miR-664b-5p, miR-766-3p, miR-766-5p, miR-885-3p, miR-885-5p, miR-93-3p, miR-93-5p, miR-941, miR-96-3p, miR-96-5p, miR-99b-3p and miR-99b-5p. Many predicted novel miRNAs are discovered by deep sequencing in human embryonic stem cells (e.g., Morin R D et al., Genome Res, 2008, 18, 610-621; Goff L A et al., PLoS One, 2009, 4:e7192; Bar M et al., Stem cells, 2008, 26, 2496-2505, the content of each of which is incorporated herein by reference in its entirety).

[0548] In one embodiment, the binding sites of embryonic stem cell specific miRNAs can be included in or removed from the 3′UTR of a polynucleotide of the disclosure to modulate the development and/or differentiation of embryonic stem cells, to inhibit the senescence of stem cells in a degenerative condition (e.g. degenerative diseases), or to stimulate the senescence and apoptosis of stem cells in a disease condition (e.g. cancer stem cells).

[0549] Many miRNA expression studies are conducted to profile the differential expression of miRNAs in various cancer cells/tissues and other diseases. Some miRNAs are abnormally over-expressed in certain cancer cells and others are under-expressed. For example, miRNAs are differentially expressed in cancer cells (WO2008/154098, US2013/0059015, US2013/0042333, WO2011/157294); cancer stem cells (US2012/0053224); pancreatic cancers and diseases (US2009/0131348, US2011/0171646, US2010/0286232, U.S. Pat. No. 8,389,210); asthma and inflammation (U.S. Pat. No. 8,415,096); prostate cancer (US2013/0053264); hepatocellular carcinoma (WO2012/151212, US2012/0329672, WO2008/054828, U.S. Pat. No. 8,252,538); lung cancer cells (WO2011/076143, WO2013/033640, WO2009/070653, US2010/0323357); cutaneous T cell lymphoma (WO2013/011378); colorectal cancer cells (WO2011/0281756, WO2011/076142); cancer positive lymph nodes (WO2009/100430, US2009/0263803); nasopharyngeal carcinoma (EP2112235); chronic obstructive pulmonary disease (US2012/0264626, US2013/0053263); thyroid cancer (WO2013/066678); ovarian cancer cells (US2012/0309645, WO2011/095623); breast cancer cells (WO2008/154098, WO2007/081740, US2012/0214699), leukemia and lymphoma (WO2008/073915, US2009/0092974, US2012/0316081, US2012/0283310, WO2010/018563, the content of each of which is incorporated herein by reference in its entirety.)

[0550] As a non-limiting example, miRNA binding sites for miRNAs that are over-expressed in certain cancer and/or tumor cells can be removed from the 3′UTR of a polynucleotide of the disclosure, restoring the expression suppressed by the over-expressed miRNAs in cancer cells, thus ameliorating the corresponsive biological function, for instance, transcription stimulation and/or repression, cell cycle arrest, apoptosis and cell death. Normal cells and tissues, wherein miRNAs expression is not up-regulated, will remain unaffected.

[0551] miRNA can also regulate complex biological processes such as angiogenesis (e.g., miR-132) (Anand and Cheresh Curr Opin Hematol 2011 18:171-176). In the polynucleotides of the disclosure, miRNA binding sites that are involved in such processes can be removed or introduced, in order to tailor the expression of the polynucleotides to biologically relevant cell types or relevant biological processes. In this context, the polynucleotides of the disclosure are defined as auxotrophic polynucleotides.

[0552] In some embodiments, a polynucleotide of the disclosure comprises a miRNA binding site, wherein the miRNA binding site comprises one or more nucleotide sequences selected from Table 7, including one or more copies of any one or more of the miRNA binding site sequences. In some embodiments, a polynucleotide of the disclosure further comprises at least one, two, three, four, five, six, seven, eight, nine, ten, or more of the same or different miRNA binding sites selected from Table 7, including any combination thereof. In some embodiments, the miRNA binding site binds to miR-142 or is complementary to miR-142. In some embodiments, the miR-142 comprises SEQ ID NO: 720. In some embodiments, the miRNA binding site binds to miR-142-3p or miR-142-5p. In some embodiments, the miR-142-3p binding site comprises SEQ ID NO: 721. In some embodiments, the miR-142-5p binding site comprises SEQ ID NO: 723. In some embodiments, the miRNA binding site comprises a nucleotide sequence at least 80%, at least 85%, at least 90%, at least 95%, or 100% identical to SEQ ID NO: 722 or SEQ ID NO: 724.

TABLE 7
miR-142 and miR-142 binding sites

| SEQ ID NO. | Description | Sequence |
|---|---|---|
| 720 | miR-142 | GACAGUGCAGUCACCCAUAAAGUAGAAAGCA |
| | | CUACUAACAGCACUGGAGGGUGUAGUGUUUC |
| | | CUACUUUAUGGAUGAGUGUACUGUG |
| 721 | miR-142-3p | UGUAGUGUUUCCUACUUUAUGGA |
| 722 | miR-142-3p binding site | UCCAUAAAGUAGGAAACACUACA |
| 723 | miR-142-5p | CAUAAAGUAGAAAGCACUACU |
| 724 | miR-142-5p binding site | AGUAGUGCUUUCUACUUUAUG |

[0553] In some embodiments, a miRNA binding site is inserted in the polynucleotide of the disclosure in any position of the polynucleotide (e.g., the 5′UTR and/or 3′UTR). In some embodiments, the 5′UTR comprises a miRNA binding site. In some embodiments, the 3′UTR comprises a miRNA binding site. In some embodiments, the 5′UTR and the 3′UTR comprise a miRNA binding site. The insertion site in the polynucleotide can be anywhere in the polynucleotide as long as the insertion of the miRNA binding site in the polynucleotide does not interfere with the translation of a functional polypeptide in the absence of the corresponding miRNA; and in the presence of the miRNA, the insertion of the miRNA binding site in the polynucleotide and the binding of the miRNA binding site to the corresponding miRNA are capable of degrading the polynucleotide or preventing the translation of the polynucleotide.

[0554] In some embodiments, a miRNA binding site is inserted in at least about 30 nucleotides downstream from the stop codon of an ORF in a polynucleotide of the disclosure comprising the ORF. In some embodiments, a miRNA binding site is inserted in at least about 10 nucleotides, at least about 15 nucleotides, at least about 20 nucleotides, at least about 25 nucleotides, at least about 30 nucleotides, at least about 35 nucleotides, at least about 40 nucleotides, at least about 45 nucleotides, at least about 50 nucleotides, at least about 55 nucleotides, at least about 60 nucleotides, at least about 65 nucleotides, at least about 70 nucleotides, at least about 75 nucleotides, at least about 80 nucleotides, at least about 85 nucleotides, at least about 90 nucleotides, at least about 95 nucleotides, or at least about 100 nucleotides downstream from the stop codon of an ORF in a polynucleotide of the disclosure. In some embodiments, a miRNA binding site is inserted in about 10 nucleotides to about 100 nucleotides, about 20 nucleotides to about 90 nucleotides, about 30 nucleotides to about 80 nucleotides, about 40 nucleotides to about 70 nucleotides, about 50 nucleotides to about 60 nucleotides, about 45 nucleotides to about 65 nucleotides downstream from the stop codon of an ORF in a polynucleotide of the disclosure.

[0555] miRNA gene regulation can be influenced by the sequence surrounding the miRNA such as, but not limited to, the species of the surrounding sequence, the type of sequence (e.g., heterologous, homologous, exogenous, endogenous, or artificial), regulatory elements in the surrounding sequence and/or structural elements in the surrounding sequence. The miRNA can be influenced by the 5′UTR and/or 3′UTR. As a non-limiting example, a non-human 3′UTR can increase the regulatory effect of the miRNA sequence on the expression of a polypeptide of interest compared to a human 3′UTR of the same sequence type.

[0556] In one embodiment, other regulatory elements and/or structural elements of the 5′UTR can influence miRNA mediated gene regulation. One example of a regulatory element and/or structural element is a structured IRES (Internal Ribosome Entry Site) in the 5′UTR, which is necessary for the binding of translational elongation factors to initiate protein translation. EIF4A2 binding to this secondarily structured element in the 5′-UTR is necessary for miRNA mediated gene expression (Meijer H A et al., Science, 2013, 340, 82-85, herein incorporated by reference in its entirety). The polynucleotides of the disclosure can further include this structured 5′UTR in order to enhance microRNA mediated gene regulation.

[0557] At least one miRNA binding site can be engineered into the 3′UTR of a polynucleotide of the disclosure. In this context, at least two, at least three, at least four, at least five, at least six, at least seven, at least eight, at least nine, at least ten, or more miRNA binding sites can be engineered into a 3′UTR of a polynucleotide of the disclosure. For example, 1 to 10, 1 to 9, 1 to 8, 1 to 7, 1 to 6, 1 to 5, 1 to 4, 1 to 3, 2, or 1 miRNA binding sites can be engineered into the 3′UTR of a polynucleotide of the disclosure. In one embodiment, miRNA binding sites incorporated into a polynucleotide of the disclosure can be the same or can be different miRNA sites. A combination of different miRNA binding sites incorporated into a polynucleotide of the disclosure can include combinations in which more than one copy of any of the different miRNA sites are incorporated. In another embodiment, miRNA binding sites incorporated into a polynucleotide of the disclosure can target the same or different tissues in the body. As a non-limiting example, through the introduction of tissue-, cell-type-, or disease-specific miRNA binding sites in the 3′-UTR of a polynucleotide of the disclosure, the degree of expression in specific cell types (e.g., hepatocytes, myeloid cells, endothelial cells, cancer cells, etc.) can be reduced.

[0558] In one embodiment, a miRNA binding site can be engineered near the 5′ terminus of the 3′UTR, about halfway between the 5′ terminus and 3′ terminus of the 3′UTR and/or near the 3′ terminus of the 3′UTR in a polynucleotide of the disclosure. As a non-limiting example, a miRNA binding site can be engineered near the 5′ terminus of the 3′UTR and about halfway between the 5′ terminus and 3′ terminus of the 3′UTR. As another non-limiting example, a miRNA binding site can be engineered near the 3′ terminus of the 3′UTR and about halfway between the 5′ terminus and 3′ terminus of the 3′UTR. As yet another non-limiting example, a miRNA binding site can be engineered near the 5′ terminus of the 3′UTR and near the 3′ terminus of the 3′UTR.

[0559] In another embodiment, a 3′UTR can comprise 1, 2, 3, 4, 5, 6, 7, 8, 9, or 10 miRNA binding sites. The miRNA binding sites can be complementary to a miRNA, miRNA seed sequence, and/or miRNA sequences flanking the seed sequence.

[0560] In one embodiment, a polynucleotide of the disclosure can be engineered to include more than one miRNA site expressed in different tissues or different cell types of a subject. As a non-limiting example, a polynucleotide of the disclosure can be engineered to include miR-192 and miR-122 to regulate expression of the polynucleotide in the liver and kidneys of a subject. In another embodiment, a polynucleotide of the disclosure can be engineered to include more than one miRNA site for the same tissue.

[0561] In some embodiments, the therapeutic window and or differential expression associated with the polypeptide encoded by a polynucleotide of the disclosure can be altered with a miRNA binding site. For example, a polynucleotide encoding a polypeptide that provides a death signal can be designed to be more highly expressed in cancer cells by virtue of the miRNA signature of those cells. Where a cancer cell expresses a lower level of a particular miRNA, the polynucleotide encoding the binding site for that miRNA (or miRNAs) would be more highly expressed. Hence, the polypeptide that provides a death signal triggers or induces cell death in the cancer cell. Neighboring noncancer cells, harboring a higher expression of the same miRNA would be less affected by the encoded death signal as the polynucleotide would be expressed at a lower level due to the effects of the miRNA binding to the binding site or “sensor” encoded in the 3′UTR. Conversely, cell survival or cytoprotective signals can be delivered to tissues containing cancer and non-cancerous cells where a miRNA has a higher expression in the cancer cells—the result being a lower survival signal to the cancer cell and a larger survival signal to the normal cell. Multiple polynucleotides can be designed and administered having different signals based on the use of miRNA binding sites as described herein.

[0562] In some embodiments, the expression of a polynucleotide of the disclosure can be controlled by incorporating at least one sensor sequence in the polynucleotide and formulating the polynucleotide for administration. As a non-limiting example, a polynucleotide of the disclosure can be targeted to a tissue or cell by incorporating a miRNA binding site and formulating the polynucleotide in a lipid nanoparticle comprising a cationic lipid, including any of the lipids described herein.

[0563] A polynucleotide of the disclosure can be engineered for more targeted expression in specific tissues, cell types, or biological conditions based on the expression patterns of miRNAs in the different tissues, cell types, or biological conditions. Through introduction of tissue-specific miRNA binding sites, a polynucleotide of the disclosure can be designed for optimal protein expression in a tissue or cell, or in the context of a biological condition.

[0564] In some embodiments, a polynucleotide of the disclosure can be designed to incorporate miRNA binding sites that either have 100% identity to known miRNA seed sequences or have less than 100% identity to miRNA seed sequences. In some embodiments, a polynucleotide of the disclosure can be designed to incorporate miRNA binding sites that have at least: 60%, 65%, 70%, 75%, 80%, 85%, 90%, 95%, 96%, 97%, 98%, or 99% identity to known miRNA seed sequences. The miRNA seed sequence can be partially mutated to decrease miRNA binding affinity and as such result in reduced downmodulation of the polynucleotide. In essence, the degree of match or mis-match between the miRNA binding site and the miRNA seed can act as a rheostat to more finely tune the ability of the miRNA to modulate protein expression. In addition, mutation in the non-seed region of a miRNA binding site can also impact the ability of a miRNA to modulate protein expression.

[0565] In one embodiment, a miRNA sequence can be incorporated into the loop of a stem loop.

[0566] In another embodiment, a miRNA seed sequence can be incorporated in the loop of a stem loop and a miRNA binding site can be incorporated into the 5′ or 3′ stem of the stem loop.

[0567] In one embodiment, a translation enhancer element (TEE) can be incorporated on the 5′end of the stem of a stem loop and a miRNA seed can be incorporated into the stem of the stem loop. In another embodiment, a TEE can be incorporated on the 5′ end of the stem of a stem loop, a miRNA seed can be incorporated into the stem of the stem loop and a miRNA binding site can be incorporated into the 3′ end of the stem or the sequence after the stem loop. The miRNA seed and the miRNA binding site can be for the same and/or different miRNA sequences.

[0568] In one embodiment, the incorporation of a miRNA sequence and/or a TEE sequence changes the shape of the stem loop region which can increase and/or decrease translation. (see e.g, Kedde et al., “A Pumilio-induced RNA structure switch in p27-3′UTR controls miR-221 and miR-22 accessibility.” Nature Cell Biology. 2010, incorporated herein by reference in its entirety).

[0569] In one embodiment, the 5′-UTR of a polynucleotide of the disclosure can comprise at least one miRNA sequence. The miRNA sequence can be, but is not limited to, a 19 or 22 nucleotide sequence and/or a miRNA sequence without the seed.

[0570] In one embodiment the miRNA sequence in the 5′UTR can be used to stabilize a polynucleotide of the disclosure described herein.

[0571] In another embodiment, a miRNA sequence in the 5′UTR of a polynucleotide of the disclosure can be used to decrease the accessibility of the site of translation initiation such as, but not limited to a start codon. See, e.g., Matsuda et al., PLoS One. 2010 11(5):e15057; incorporated herein by reference in its entirety, which used antisense locked nucleic acid (LNA) oligonucleotides and exon-junction complexes (EJCs) around a start codon (−4 to +37 where the A of the AUG codons is +1) in order to decrease the accessibility to the first start codon (AUG). Matsuda showed that altering the sequence around the start codon with an LNA or EJC affected the efficiency, length and structural stability of a polynucleotide. A polynucleotide of the disclosure can comprise a miRNA sequence, instead of the LNA or EJC sequence described by Matsuda et al, near the site of translation initiation in order to decrease the accessibility to the site of translation initiation. The site of translation initiation can be prior to, after or within the miRNA sequence. As a non-limiting example, the site of translation initiation can be located within a miRNA sequence such as a seed sequence or binding site. As another non-limiting example, the site of translation initiation can be located within a miR-122 sequence such as the seed sequence or the mir-122 binding site.

[0572] In some embodiments, a polynucleotide of the disclosure can include at least one miRNA in order to dampen the antigen presentation by antigen presenting cells. The miRNA can be the complete miRNA sequence, the miRNA seed sequence, the miRNA sequence without the seed, or a combination thereof. As a non-limiting example, a miRNA incorporated into a polynucleotide of the disclosure can be specific to the hematopoietic system. As another non-limiting example, a miRNA incorporated into a polynucleotide of the disclosure to dampen antigen presentation is miR-142-3p.

[0573] In some embodiments, a polynucleotide of the disclosure can include at least one miRNA in order to dampen expression of the encoded polypeptide in a tissue or cell of interest. As a non-limiting example, a polynucleotide of the disclosure can include at least one miR-122 binding site in order to dampen expression of an encoded polypeptide of interest in the liver. As another non-limiting example a polynucleotide of the disclosure can include at least one miR-142-3p binding site, miR-142-3p seed sequence, miR-142-3p binding site without the seed, miR-142-5p binding site, miR-142-5p seed sequence, miR-142-5p binding site without the seed, miR-146 binding site, miR-146 seed sequence and/or miR-146 binding site without the seed sequence.

[0574] In some embodiments, a polynucleotide of the disclosure can comprise at least one miRNA binding site in the 3′UTR in order to selectively degrade mRNA therapeutics in the immune cells to subdue unwanted immunogenic reactions caused by therapeutic delivery. As a non-limiting example, the miRNA binding site can make a polynucleotide of the disclosure more unstable in antigen presenting cells. Non-limiting examples of these miRNAs include mir-142-5p, mir-142-3p, mir-146a-5p, and mir-146-3p.

[0575] In one embodiment, a polynucleotide of the disclosure comprises at least one miRNA sequence in a region of the polynucleotide that can interact with a RNA binding protein.

[0576] In some embodiments, the polynucleotide of the disclosure (e.g., a RNA, e.g., a mRNA) comprising (i) a sequence-optimized nucleotide sequence (e.g., an ORF) encoding a MCM polypeptide (e.g., the wild-type sequence, functional fragment, or variant thereof) and (ii) a miRNA binding site (e.g., a miRNA binding site that binds to miR-142).

[0577] In some embodiments, the polynucleotide of the disclosure comprises a uracil-modified sequence encoding a MCM polypeptide disclosed herein and a miRNA binding site disclosed herein, e.g., a miRNA binding site that binds to miR-142. In some embodiments, the uracil-modified sequence encoding a MCM polypeptide comprises at least one chemically modified nucleobase, e.g., 5-methoxyuracil. In some embodiments, at least 95% of a type of nucleobase (e.g., uracil) in a uracil-modified sequence encoding a MCM polypeptide of the disclosure are modified nucleobases. In some embodiments, at least 95% of uracil in a uracil-modified sequence encoding a MCM polypeptide is 5-methoxyuridine. In some embodiments, the polynucleotide comprising a nucleotide sequence encoding a MCM polypeptide disclosed herein and a miRNA binding site is formulated with a delivery agent, e.g., a compound having the Formula (I), e.g., any of Compounds 1-147.

### 3′ UTR and the AU Rich Elements

[0578] The disclosure also includes a polynucleotide that comprises both one or more 3′ untranslated regions as well as the polynucleotide described herein, i.e., a polynucleotide comprising an ORF encoding an MCM polypeptide.

[0579] Natural or wild type 3′ UTRs are known to have stretches of Adenosines and Uridines embedded in them. These AU rich signatures are particularly prevalent in genes with high rates of turnover. Based on their sequence features and functional properties, the AU rich elements (AREs) can be separated into three classes (Chen et al, 1995): Class I AREs contain several dispersed copies of an AUUUA motif within U-rich regions. C-Myc and MyoD contain class I AREs. Class II AREs possess two or more overlapping UUAUUUA(U/A)(U/A) nonamers. Molecules containing this type of AREs include GM-CSF and TNF-α. Class III ARES are less well defined. These U rich regions do not contain an AUUUA motif. c-Jun and Myogenin are two well-studied examples of this class. Most proteins binding to the AREs are known to destabilize the messenger, whereas members of the ELAV family, most notably HuR, have been documented to increase the stability of mRNA. HuR binds to AREs of all the three classes. Engineering the HuR specific binding sites into the 3′ UTR of nucleic acid molecules will lead to HuR binding and thus, stabilization of the message in vivo.

[0580] Introduction, removal or modification of 3′ UTR AU rich elements (AREs) can be used to modulate the stability of polynucleotides of the disclosure. When engineering specific polynucleotides, one or more copies of an ARE can be introduced to make polynucleotides of the disclosure less stable and thereby curtail translation and decrease production of the resultant protein. Likewise, AREs can be identified and removed or mutated to increase the intracellular stability and thus increase translation and production of the resultant protein. Transfection experiments can be conducted in relevant cell lines, using polynucleotides of the disclosure and protein production can be assayed at various time points post-transfection. For example, cells can be transfected with different ARE-engineering molecules and by using an ELISA kit to the relevant protein and assaying protein produced at 6 hour, 12 hour, 24 hour, 48 hour, and 7 days post-transfection.

### Regions Having a 5′ Cap

[0581] The disclosure also includes a polynucleotide that comprises both a 5′ Cap and the polynucleotide described herein, i.e., a polynucleotide comprising an ORF encoding an MCM polypeptide.

[0582] The 5′ cap structure of a natural mRNA is involved in nuclear export, increasing mRNA stability and binds the mRNA Cap Binding Protein (CBP), which is responsible for mRNA stability in the cell and translation competency through the association of CBP with poly(A) binding protein to form the mature cyclic mRNA species. The cap further assists the removal of 5′ proximal introns during mRNA splicing.

[0583] Endogenous mRNA molecules can be 5′-end capped generating a 5′-ppp-5′-triphosphate linkage between a terminal guanosine cap residue and the 5′-terminal transcribed sense nucleotide of the mRNA molecule. This 5′-guanylate cap can then be methylated to generate an N7-methyl-guanylate residue. The ribose sugars of the terminal and/or anteterminal transcribed nucleotides of the 5′ end of the mRNA can optionally also be 2′-O-methylated. 5′-decapping through hydrolysis and cleavage of the guanylate cap structure can target a nucleic acid molecule, such as an mRNA molecule, for degradation.

[0584] In some embodiments, polynucleotides can be designed to incorporate a cap moiety. Modifications to the polynucleotides of the present disclosure can generate a non-hydrolyzable cap structure preventing decapping and thus increasing mRNA half-life. Because cap structure hydrolysis requires cleavage of 5′-ppp-5′ phosphorodiester linkages, modified nucleotides can be used during the capping reaction. For example, a Vaccinia Capping Enzyme from New England Biolabs (Ipswich, Mass.) can be used with α-thio-guanosine nucleotides according to the manufacturer's instructions to create a phosphorothioate linkage in the 5′-ppp-5′ cap. Additional modified guanosine nucleotides can be used such as α-methyl-phosphonate and seleno-phosphate nucleotides.

[0585] Additional modifications include, but are not limited to, 2′-O-methylation of the ribose sugars of 5′-terminal and/or 5′-anteterminal nucleotides of the polynucleotide (as mentioned above) on the 2′-hydroxyl group of the sugar ring. Multiple distinct 5′-cap structures can be used to generate the 5′-cap of a nucleic acid molecule, such as a polynucleotide that functions as an mRNA molecule.

[0586] Cap analogs, which herein are also referred to as synthetic cap analogs, chemical caps, chemical cap analogs, or structural or functional cap analogs, differ from natural (i.e., endogenous, wild-type or physiological) 5′-caps in their chemical structure, while retaining cap function. Cap analogs can be chemically (i.e., non-enzymatically) or enzymatically synthesized and/or linked to the polynucleotides of the disclosure.

[0587] For example, the Anti-Reverse Cap Analog (ARCA) cap contains two guanines linked by a 5′-5′-triphosphate group, wherein one guanine contains an N7 methyl group as well as a 3′-O-methyl group (i.e., N7,3′-O-dimethyl-guanosine-5′-triphosphate-5′-guanosine (m⁷G-3′mppp-G; which can equivalently be designated 3′ O-Me-m7G(5′)ppp(5′)G). The 3′-0 atom of the other, unmodified, guanine becomes linked to the 5′-terminal nucleotide of the capped polynucleotide. The N7- and 3′-O-methlyated guanine provides the terminal moiety of the capped polynucleotide.

[0588] Another exemplary cap is mCAP, which is similar to ARCA but has a 2′-O-methyl group on guanosine (i.e., N7,2′-O-dimethyl-guanosine-5′-triphosphate-5′-guanosine, m⁷Gm-ppp-G).

[0589] In some embodiments, the cap is a dinucleotide cap analog. As a non-limiting example, the dinucleotide cap analog can be modified at different phosphate positions with a boranophosphate group or a phophoroselenoate group such as the dinucleotide cap analogs described in U.S. Pat. No. 8,519,110, the contents of which are herein incorporated by reference in its entirety.

[0590] In another embodiment, the cap is a cap analog is a N7-(4-chlorophenoxyethyl) substituted dicucleotide form of a cap analog known in the art and/or described herein. Non-limiting examples of a N7-(4-chlorophenoxyethyl) substituted dicucleotide form of a cap analog include a N7-(4-chlorophenoxyethyl)-G(5′)ppp(5′)G and a N7-(4-chlorophenoxyethyl)-m^{3′-O}G(5′)ppp(5′)G cap analog (See, e.g., the various cap analogs and the methods of synthesizing cap analogs described in Kore et al. Bioorganic & Medicinal Chemistry 2013 21:4570-4574; the contents of which are herein incorporated by reference in its entirety). In another embodiment, a cap analog of the present disclosure is a 4-chloro/bromophenoxyethyl analog.

[0591] While cap analogs allow for the concomitant capping of a polynucleotide or a region thereof, in an in vitro transcription reaction, up to 20% of transcripts can remain uncapped. This, as well as the structural differences of a cap analog from an endogenous 5′-cap structures of nucleic acids produced by the endogenous, cellular transcription machinery, can lead to reduced translational competency and reduced cellular stability.

[0592] Polynucleotides of the disclosure can also be capped post-manufacture (whether IVT or chemical synthesis), using enzymes, in order to generate more authentic 5′-cap structures. As used herein, the phrase “more authentic” refers to a feature that closely mirrors or mimics, either structurally or functionally, an endogenous or wild type feature. That is, a “more authentic” feature is better representative of an endogenous, wild-type, natural or physiological cellular function and/or structure as compared to synthetic features or analogs, etc., of the prior art, or which outperforms the corresponding endogenous, wild-type, natural or physiological feature in one or more respects. Non-limiting examples of more authentic 5′cap structures of the present disclosure are those that, among other things, have enhanced binding of cap binding proteins, increased half-life, reduced susceptibility to 5′ endonucleases and/or reduced 5′decapping, as compared to synthetic 5′cap structures known in the art (or to a wild-type, natural or physiological 5′cap structure). For example, recombinant Vaccinia Virus Capping Enzyme and recombinant 2′-O-methyltransferase enzyme can create a canonical 5′-5′-triphosphate linkage between the 5′-terminal nucleotide of a polynucleotide and a guanine cap nucleotide wherein the cap guanine contains an N7 methylation and the 5′-terminal nucleotide of the mRNA contains a 2′-O-methyl. Such a structure is termed the Cap1 structure. This cap results in a higher translational-competency and cellular stability and a reduced activation of cellular pro-inflammatory cytokines, as compared, e.g., to other 5′cap analog structures known in the art. Cap structures include, but are not limited to, 7mG(5′)ppp(5′)N,pN2p (cap 0), 7mG(5′)ppp(5′)NlmpNp (cap 1), and 7mG(5′)-ppp(5′)NlmpN2mp (cap 2).

[0593] As a non-limiting example, capping chimeric polynucleotides post-manufacture can be more efficient as nearly 100% of the chimeric polynucleotides can be capped. This is in contrast to ˜80% when a cap analog is linked to a chimeric polynucleotide in the course of an in vitro transcription reaction.

[0594] According to the present disclosure, 5′ terminal caps can include endogenous caps or cap analogs. According to the present disclosure, a 5′ terminal cap can comprise a guanine analog. Useful guanine analogs include, but are not limited to, inosine, N1-methyl-guanosine, 2′fluoro-guanosine, 7-deaza-guanosine, 8-oxo-guanosine, 2-amino-guanosine, LNA-guanosine, and 2-azido-guanosine.

### Poly-A Tails

[0595] The disclosure also includes a polynucleotide that comprises both a poly-A tail and the polynucleotide described herein, i.e., a polynucleotide comprising an ORF encoding an MCM polypeptide.

[0596] During RNA processing, a long chain of adenine nucleotides (poly-A tail) can be added to a polynucleotide such as an mRNA molecule in order to increase stability. Immediately after transcription, the 3′ end of the transcript can be cleaved to free a 3′ hydroxyl. Then poly-A polymerase adds a chain of adenine nucleotides to the RNA. The process, called polyadenylation, adds a poly-A tail that can be between, for example, approximately 80 to approximately 250 residues long, including approximately 80, 90, 100, 110, 120, 130, 140, 150, 160, 170, 180, 190, 200, 210, 220, 230, 240 or 250 residues long.

[0597] PolyA tails can also be added after the construct is exported from the nucleus.

[0598] According to the present disclosure, terminal groups on the poly A tail can be incorporated for stabilization. Polynucleotides of the present disclosure can include des-3′ hydroxyl tails. They can also include structural moieties or 2′-Omethyl modifications as taught by Junjie Li, et al. (Current Biology, Vol. 15, 1501-1507, Aug. 23, 2005, the contents of which are incorporated herein by reference in its entirety).

[0599] The polynucleotides of the present disclosure can be designed to encode transcripts with alternative polyA tail structures including histone mRNA. According to Norbury, “Terminal uridylation has also been detected on human replication-dependent histone mRNAs. The turnover of these mRNAs is thought to be important for the prevention of potentially toxic histone accumulation following the completion or inhibition of chromosomal DNA replication. These mRNAs are distinguished by their lack of a 3′ poly(A) tail, the function of which is instead assumed by a stable stem-loop structure and its cognate stem-loop binding protein (SLBP); the latter carries out the same functions as those of PABP on polyadenylated mRNAs” (Norbury, “Cytoplasmic RNA: a case of the tail wagging the dog,” Nature Reviews Molecular Cell Biology; AOP, published online 29 Aug. 2013; doi:10.1038/nrm3645) the contents of which are incorporated herein by reference in its entirety.

[0600] Unique poly-A tail lengths provide certain advantages to the polynucleotides of the present disclosure.

[0601] Generally, the length of a poly-A tail, when present, is greater than 30 nucleotides in length. In another embodiment, the poly-A tail is greater than 35 nucleotides in length (e.g., at least or greater than about 35, 40, 45, 50, 55, 60, 70, 80, 90, 100, 120, 140, 160, 180, 200, 250, 300, 350, 400, 450, 500, 600, 700, 800, 900, 1,000, 1,100, 1,200, 1,300, 1,400, 1,500, 1,600, 1,700, 1,800, 1,900, 2,000, 2,500, and 3,000 nucleotides). In some embodiments, the polynucleotide or region thereof includes from about 30 to about 3,000 nucleotides (e.g., from 30 to 50, from 30 to 100, from 30 to 250, from 30 to 500, from 30 to 750, from 30 to 1,000, from 30 to 1,500, from 30 to 2,000, from 30 to 2,500, from 50 to 100, from 50 to 250, from 50 to 500, from 50 to 750, from 50 to 1,000, from 50 to 1,500, from 50 to 2,000, from 50 to 2,500, from 50 to 3,000, from 100 to 500, from 100 to 750, from 100 to 1,000, from 100 to 1,500, from 100 to 2,000, from 100 to 2,500, from 100 to 3,000, from 500 to 750, from 500 to 1,000, from 500 to 1,500, from 500 to 2,000, from 500 to 2,500, from 500 to 3,000, from 1,000 to 1,500, from 1,000 to 2,000, from 1,000 to 2,500, from 1,000 to 3,000, from 1,500 to 2,000, from 1,500 to 2,500, from 1,500 to 3,000, from 2,000 to 3,000, from 2,000 to 2,500, and from 2,500 to 3,000).

[0602] In some embodiments, the poly-A tail is designed relative to the length of the overall polynucleotide or the length of a particular region of the polynucleotide. This design can be based on the length of a coding region, the length of a particular feature or region or based on the length of the ultimate product expressed from the polynucleotides.

[0603] In this context, the poly-A tail can be 10, 20, 30, 40, 50, 60, 70, 80, 90, or 100% greater in length than the polynucleotide or feature thereof. The poly-A tail can also be designed as a fraction of the polynucleotides to which it belongs. In this context, the poly-A tail can be 10, 20, 30, 40, 50, 60, 70, 80, or 90% or more of the total length of the construct, a construct region or the total length of the construct minus the poly-A tail. Further, engineered binding sites and conjugation of polynucleotides for Poly-A binding protein can enhance expression.

[0604] Additionally, multiple distinct polynucleotides can be linked together via the PABP (Poly-A binding protein) through the 3′-end using modified nucleotides at the 3′-terminus of the poly-A tail. Transfection experiments can be conducted in relevant cell lines at and protein production can be assayed by ELISA at 12 hr, 24 hr, 48 hr, 72 hr and day 7 post-transfection.

[0605] In some embodiments, the polynucleotides of the present disclosure are designed to include a polyA-G Quartet region. The G-quartet is a cyclic hydrogen bonded array of four guanine nucleotides that can be formed by G-rich sequences in both DNA and RNA. In this embodiment, the G-quartet is incorporated at the end of the poly-A tail. The resultant polynucleotide is assayed for stability, protein production and other parameters including half-life at various time points. It has been discovered that the polyA-G quartet results in protein production from an mRNA equivalent to at least 75% of that seen using a poly-A tail of 120 nucleotides alone.

### Start Codon Region

[0606] The disclosure also includes a polynucleotide that comprises both a start codon region and the polynucleotide described herein, i.e., a polynucleotide comprising an ORF encoding an MCM polypeptide. In some embodiments, the polynucleotides of the present disclosure can have regions that are analogous to or function like a start codon region.

[0607] In some embodiments, the translation of a polynucleotide can initiate on a codon that is not the start codon AUG. Translation of the polynucleotide can initiate on an alternative start codon such as, but not limited to, ACG, AGG, AAG, CTG/CUG, GTG/GUG, ATA/AUA, ATT/AUU, TTG/UUG (see Touriol et al. Biology of the Cell 95 (2003) 169-178 and Matsuda and Mauro PLoS ONE, 2010 5:11; the contents of each of which are herein incorporated by reference in its entirety). As a non-limiting example, the translation of a polynucleotide begins on the alternative start codon ACG. As another non-limiting example, polynucleotide translation begins on the alternative start codon CTG or CUG. As yet another non-limiting example, the translation of a polynucleotide begins on the alternative start codon GTG or GUG.

[0608] Nucleotides flanking a codon that initiates translation such as, but not limited to, a start codon or an alternative start codon, are known to affect the translation efficiency, the length and/or the structure of the polynucleotide. (See, e.g., Matsuda and Mauro PLoS ONE, 2010 5:11; the contents of which are herein incorporated by reference in its entirety). Masking any of the nucleotides flanking a codon that initiates translation can be used to alter the position of translation initiation, translation efficiency, length and/or structure of a polynucleotide.

[0609] In some embodiments, a masking agent can be used near the start codon or alternative start codon in order to mask or hide the codon to reduce the probability of translation initiation at the masked start codon or alternative start codon. Non-limiting examples of masking agents include antisense locked nucleic acids (LNA) polynucleotides and exon-junction complexes (EJCs) (See, e.g., Matsuda and Mauro describing masking agents LNA polynucleotides and EJCs (PLoS ONE, 2010 5:11); the contents of which are herein incorporated by reference in its entirety).

[0610] In another embodiment, a masking agent can be used to mask a start codon of a polynucleotide in order to increase the likelihood that translation will initiate on an alternative start codon.

[0611] In some embodiments, a masking agent can be used to mask a first start codon or alternative start codon in order to increase the chance that translation will initiate on a start codon or alternative start codon downstream to the masked start codon or alternative start codon.

[0612] In some embodiments, a start codon or alternative start codon can be located within a perfect complement for a miR binding site. The perfect complement of a miR binding site can help control the translation, length and/or structure of the polynucleotide similar to a masking agent. As a non-limiting example, the start codon or alternative start codon can be located in the middle of a perfect complement for a miR-122 binding site. The start codon or alternative start codon can be located after the first nucleotide, second nucleotide, third nucleotide, fourth nucleotide, fifth nucleotide, sixth nucleotide, seventh nucleotide, eighth nucleotide, ninth nucleotide, tenth nucleotide, eleventh nucleotide, twelfth nucleotide, thirteenth nucleotide, fourteenth nucleotide, fifteenth nucleotide, sixteenth nucleotide, seventeenth nucleotide, eighteenth nucleotide, nineteenth nucleotide, twentieth nucleotide or twenty-first nucleotide.

[0613] In another embodiment, the start codon of a polynucleotide can be removed from the polynucleotide sequence in order to have the translation of the polynucleotide begin on a codon that is not the start codon. Translation of the polynucleotide can begin on the codon following the removed start codon or on a downstream start codon or an alternative start codon. In a non-limiting example, the start codon ATG or AUG is removed as the first 3 nucleotides of the polynucleotide sequence in order to have translation initiate on a downstream start codon or alternative start codon. The polynucleotide sequence where the start codon was removed can further comprise at least one masking agent for the downstream start codon and/or alternative start codons in order to control or attempt to control the initiation of translation, the length of the polynucleotide and/or the structure of the polynucleotide.

### Stop Codon Region

[0614] The disclosure also includes a polynucleotide that comprises both a stop codon region and the polynucleotide described herein, i.e., a polynucleotide comprising an ORF encoding an MCM polypeptide. In some embodiments, the polynucleotides of the present disclosure can include at least two stop codons before the 3′ untranslated region (UTR). The stop codon can be selected from TGA, TAA and TAG. In some embodiments, the polynucleotides of the present disclosure include the stop codon TGA and one additional stop codon. In a further embodiment the addition stop codon can be TAA. In another embodiment, the polynucleotides of the present disclosure include three stop codons.

### Insertions and Substitutions

[0615] The disclosure also includes a polynucleotide that comprises insertions and/or substitutions in the polynucleotide described herein, i.e., a polynucleotide comprising an ORF encoding an MCM polypeptide.

[0616] In some embodiments, the 5′UTR of the polynucleotide can be replaced by the insertion of at least one region and/or string of nucleosides of the same base. The region and/or string of nucleotides can include, but is not limited to, at least 3, at least 4, at least 5, at least 6, at least 7 or at least 8 nucleotides and the nucleotides can be natural and/or unnatural. As a non-limiting example, the group of nucleotides can include 5-8 adenine, cytosine, thymine, a string of any of the other nucleotides disclosed herein and/or combinations thereof.

[0617] In some embodiments, the 5′UTR of the polynucleotide can be replaced by the insertion of at least two regions and/or strings of nucleotides of two different bases such as, but not limited to, adenine, cytosine, thymine, any of the other nucleotides disclosed herein and/or combinations thereof. For example, the 5′UTR can be replaced by inserting 5-8 adenine bases followed by the insertion of 5-8 cytosine bases. In another example, the 5′UTR can be replaced by inserting 5-8 cytosine bases followed by the insertion of 5-8 adenine bases.

[0618] In some embodiments, the polynucleotide can include at least one substitution and/or insertion downstream of the transcription start site that can be recognized by an RNA polymerase. As a non-limiting example, at least one substitution and/or insertion can occur downstream of the transcription start site by substituting at least one nucleic acid in the region just downstream of the transcription start site (such as, but not limited to, +1 to +6). Changes to region of nucleotides just downstream of the transcription start site can affect initiation rates, increase apparent nucleotide triphosphate (NTP) reaction constant values, and increase the dissociation of short transcripts from the transcription complex curing initial transcription (Brieba et al, Biochemistry (2002) 41: 5144-5149; herein incorporated by reference in its entirety). The modification, substitution and/or insertion of at least one nucleoside can cause a silent mutation of the sequence or can cause a mutation in the amino acid sequence.

[0619] In some embodiments, the polynucleotide can include the substitution of at least 1, at least 2, at least 3, at least 4, at least 5, at least 6, at least 7, at least 8, at least 9, at least 10, at least 11, at least 12 or at least 13 guanine bases downstream of the transcription start site.

[0620] In some embodiments, the polynucleotide can include the substitution of at least 1, at least 2, at least 3, at least 4, at least 5 or at least 6 guanine bases in the region just downstream of the transcription start site. As a non-limiting example, if the nucleotides in the region are GGGAGA, the guanine bases can be substituted by at least 1, at least 2, at least 3 or at least 4 adenine nucleotides. In another non-limiting example, if the nucleotides in the region are GGGAGA the guanine bases can be substituted by at least 1, at least 2, at least 3 or at least 4 cytosine bases. In another non-limiting example, if the nucleotides in the region are GGGAGA the guanine bases can be substituted by at least 1, at least 2, at least 3 or at least 4 thymine, and/or any of the nucleotides described herein.

[0621] In some embodiments, the polynucleotide can include at least one substitution and/or insertion upstream of the start codon. For the purpose of clarity, one of skill in the art would appreciate that the start codon is the first codon of the protein coding region whereas the transcription start site is the site where transcription begins. The polynucleotide can include, but is not limited to, at least 1, at least 2, at least 3, at least 4, at least 5, at least 6, at least 7 or at least 8 substitutions and/or insertions of nucleotide bases. The nucleotide bases can be inserted or substituted at 1, at least 1, at least 2, at least 3, at least 4 or at least 5 locations upstream of the start codon. The nucleotides inserted and/or substituted can be the same base (e.g., all A or all C or all T or all G), two different bases (e.g., A and C, A and T, or C and T), three different bases (e.g., A, C and T or A, C and T) or at least four different bases. As a non-limiting example, the guanine base upstream of the coding region in the polynucleotide can be substituted with adenine, cytosine, thymine, or any of the nucleotides described herein. In another non-limiting example the substitution of guanine bases in the polynucleotide can be designed so as to leave one guanine base in the region downstream of the transcription start site and before the start codon (see Esvelt et al. Nature (2011) 472(7344):499-503; the contents of which is herein incorporated by reference in its entirety). As a non-limiting example, at least 5 nucleotides can be inserted at 1 location downstream of the transcription start site but upstream of the start codon and the at least 5 nucleotides can be the same base type.

### IV. Methods of Making Polynucleotides

[0622] The present disclosure also provides methods for making a polynucleotide disclosed herein or a complement thereof. In some aspects, a polynucleotide (e.g., an mRNA) disclosed herein, and encoding an MCM polypeptide or a functional fragment thereof, can be constructed using in vitro transcription. In other aspects, a polynucleotide (e.g., an mRNA) disclosed herein, and encoding an MCM polypeptide or a functional fragment thereof, can be constructed by chemical synthesis using an oligonucleotide synthesizer. In other aspects, a polynucleotide (e.g., an mRNA) disclosed herein, and encoding an MCM polypeptide or a functional fragment thereof is made by using a host cell. In certain aspects, a polynucleotide (e.g., an mRNA) disclosed herein, and encoding an MCM polypeptide or a functional fragment thereof is made by one or more combination of the IVT, chemical synthesis, host cell expression, or any other methods known in the art.

[0623] Naturally occurring nucleosides, non-naturally occurring nucleosides, or combinations thereof, can totally or partially naturally replace occurring nucleosides present in the candidate nucleotide sequence and can be incorporated into a sequence-optimized nucleotide sequence (e.g., an mRNA) encoding an MCM polypeptide. The resultant mRNAs can then be examined for their ability to produce protein and/or produce a therapeutic outcome.

### In Vitro Transcription-Enzymatic Synthesis

[0624] A polynucleotide disclosed herein can be transcribed using an in vitro transcription (IVT) system. The system typically comprises a transcription buffer, nucleotide triphosphates (NTPs), an RNase inhibitor and a polymerase. The NTPs can be selected from, but are not limited to, those described herein including natural and unnatural (modified) NTPs. The polymerase can be selected from, but is not limited to, T7 RNA polymerase, T3 RNA polymerase and mutant polymerases such as, but not limited to, polymerases able to incorporate modified nucleic acids. See U.S. Publ. No. US20130259923, which is herein incorporated by reference in its entirety.

[0625] The IVT system typically comprises a transcription buffer, nucleotide triphosphates (NTPs), an RNase inhibitor and a polymerase. The NTPs can be selected from, but are not limited to, those described herein including natural and unnatural (modified) NTPs. The polymerase can be selected from, but is not limited to, T7 RNA polymerase, T3 RNA polymerase and mutant polymerases such as, but not limited to, polymerases able to incorporate polynucleotides disclosed herein.

[0626] Any number of RNA polymerases or variants can be used in the synthesis of the polynucleotides of the present disclosure.

[0627] RNA polymerases can be modified by inserting or deleting amino acids of the RNA polymerase sequence. As a non-limiting example, the RNA polymerase can be modified to exhibit an increased ability to incorporate a 2′-modified nucleotide triphosphate compared to an unmodified RNA polymerase (see International Publication WO2008078180 and U.S. Pat. No. 8,101,385; herein incorporated by reference in their entireties).

[0628] Variants can be obtained by evolving an RNA polymerase, optimizing the RNA polymerase amino acid and/or nucleic acid sequence and/or by using other methods known in the art. As a non-limiting example, T7 RNA polymerase variants can be evolved using the continuous directed evolution system set out by Esvelt et al. (Nature (2011) 472(7344):499-503; herein incorporated by reference in its entirety) where clones of T7 RNA polymerase can encode at least one mutation such as, but not limited to, lysine at position 93 substituted for threonine (K93T), I4M, A7T, E63V, V64D, A65E, D66Y, T76N, C125R, S128R, A136T, N165S, G175R, H176L, Y178H, F182L, L196F, G198V, D208Y, E222K, S228A, Q239R, T243N, G259D, M2671, G280C, H300R, D351A, A354S, E356D, L360P, A383V, Y385C, D388Y, S397R, M401T, N410S, K450R, P451T, G452V, E484A, H523L, H524N, G542V, E565K, K577E, K577M, N601S, S684Y, L699I, K713E, N748D, Q754R, E775K, A827V, D851N or L864F. As another non-limiting example, T7 RNA polymerase variants can encode at least mutation as described in U.S. Pub. Nos. 20100120024 and 20070117112; herein incorporated by reference in their entireties. Variants of RNA polymerase can also include, but are not limited to, substitutional variants, conservative amino acid substitution, insertional variants, deletional variants and/or covalent derivatives.

[0629] In one aspect, the polynucleotide can be designed to be recognized by the wild type or variant RNA polymerases. In doing so, the polynucleotide can be modified to contain sites or regions of sequence changes from the wild type or parent chimeric polynucleotide.

[0630] Polynucleotide or nucleic acid synthesis reactions can be carried out by enzymatic methods utilizing polymerases. Polymerases catalyze the creation of phosphodiester bonds between nucleotides in a polynucleotide or nucleic acid chain. Currently known DNA polymerases can be divided into different families based on amino acid sequence comparison and crystal structure analysis. DNA polymerase I (pol I) or A polymerase family, including the Klenow fragments of E. Coli, Bacillus DNA polymerase I, Thermus aquaticus (Taq) DNA polymerases, and the T7 RNA and DNA polymerases, is among the best studied of these families. Another large family is DNA polymerase α (pol α) or B polymerase family, including all eukaryotic replicating DNA polymerases and polymerases from phages T4 and RB69. Although they employ similar catalytic mechanism, these families of polymerases differ in substrate specificity, substrate analog-incorporating efficiency, degree and rate for primer extension, mode of DNA synthesis, exonuclease activity, and sensitivity against inhibitors.

[0631] DNA polymerases are also selected based on the optimum reaction conditions they require, such as reaction temperature, pH, and template and primer concentrations. Sometimes a combination of more than one DNA polymerases is employed to achieve the desired DNA fragment size and synthesis efficiency. For example, Cheng et al. increase pH, add glycerol and dimethyl sulfoxide, decrease denaturation times, increase extension times, and utilize a secondary thermostable DNA polymerase that possesses a 3′ to 5′ exonuclease activity to effectively amplify long targets from cloned inserts and human genomic DNA. (Cheng et al., PNAS, Vol. 91, 5695-5699 (1994), the contents of which are incorporated herein by reference in their entirety). RNA polymerases from bacteriophage T3, T7, and SP6 have been widely used to prepare RNAs for biochemical and biophysical studies. RNA polymerases, capping enzymes, and poly-A polymerases are disclosed in the co-pending International Publication No. WO2014028429, the contents of which are incorporated herein by reference in their entirety.

[0632] In one aspect, the RNA polymerase which can be used in the synthesis of the polynucleotides described herein is a Syn5 RNA polymerase. (see Zhu et al. Nucleic Acids Research 2013, the contents of which is herein incorporated by reference in its entirety). The Syn5 RNA polymerase was recently characterized from marine cyanophage Syn5 by Zhu et al. where they also identified the promoter sequence (see Zhu et al. Nucleic Acids Research 2013, the contents of which is herein incorporated by reference in its entirety). Zhu et al. found that Syn5 RNA polymerase catalyzed RNA synthesis over a wider range of temperatures and salinity as compared to T7 RNA polymerase. Additionally, the requirement for the initiating nucleotide at the promoter was found to be less stringent for Syn5 RNA polymerase as compared to the T7 RNA polymerase making Syn5 RNA polymerase promising for RNA synthesis.

[0633] In one aspect, a Syn5 RNA polymerase can be used in the synthesis of the polynucleotides described herein. As a non-limiting example, a Syn5 RNA polymerase can be used in the synthesis of the polynucleotide requiring a precise 3′-termini.

[0634] In one aspect, a Syn5 promoter can be used in the synthesis of the polynucleotides. As a non-limiting example, the Syn5 promoter can be 5′-ATTGGGCACCCGTAAGGG-3′ as described by Zhu et al. (Nucleic Acids Research 2013, the contents of which is herein incorporated by reference in its entirety).

[0635] In one aspect, a Syn5 RNA polymerase can be used in the synthesis of polynucleotides comprising at least one chemical modification described herein and/or known in the art. (see e.g., the incorporation of pseudo-UTP and 5Me-CTP described in Zhu et al. Nucleic Acids Research 2013, the contents of which is herein incorporated by reference in its entirety).

[0636] In one aspect, the polynucleotides described herein can be synthesized using a Syn5 RNA polymerase which has been purified using modified and improved purification procedure described by Zhu et al. (Nucleic Acids Research 2013, the contents of which is herein incorporated by reference in its entirety).

[0637] Various tools in genetic engineering are based on the enzymatic amplification of a target gene which acts as a template. For the study of sequences of individual genes or specific regions of interest and other research needs, it is necessary to generate multiple copies of a target gene from a small sample of polynucleotides or nucleic acids. Such methods can be applied in the manufacture of the polynucleotides of the disclosure.

[0638] Polymerase chain reaction (PCR) has wide applications in rapid amplification of a target gene, as well as genome mapping and sequencing. The key components for synthesizing DNA comprise target DNA molecules as a template, primers complementary to the ends of target DNA strands, deoxynucleoside triphosphates (dNTPs) as building blocks, and a DNA polymerase. As PCR progresses through denaturation, annealing and extension steps, the newly produced DNA molecules can act as a template for the next circle of replication, achieving exponentially amplification of the target DNA. PCR requires a cycle of heating and cooling for denaturation and annealing. Variations of the basic PCR include asymmetric PCR [Innis et al., PNAS, vol. 85, 9436-9440 (1988)], inverse PCR [Ochman et al., Genetics, vol. 120(3), 621-623, (1988)], reverse transcription PCR (RT-PCR) (Freeman et al., BioTechniques, vol. 26(1), 112-22, 124-5 (1999), the contents of which are incorporated herein by reference in their entirety and so on). In RT-PCR, a single stranded RNA is the desired target and is converted to a double stranded DNA first by reverse transcriptase.

[0639] A variety of isothermal in vitro nucleic acid amplification techniques have been developed as alternatives or complements of PCR. For example, strand displacement amplification (SDA) is based on the ability of a restriction enzyme to form a nick. (Walker et al., PNAS, vol. 89, 392-396 (1992), the contents of which are incorporated herein by reference in their entirety)). A restriction enzyme recognition sequence is inserted into an annealed primer sequence. Primers are extended by a DNA polymerase and dNTPs to form a duplex. Only one strand of the duplex is cleaved by the restriction enzyme. Each single strand chain is then available as a template for subsequent synthesis. SDA does not require the complicated temperature control cycle of PCR.

[0640] Nucleic acid sequence-based amplification (NASBA), also called transcription mediated amplification (TMA), is also an isothermal amplification method that utilizes a combination of DNA polymerase, reverse transcriptase, RNAse H, and T7 RNA polymerase. [Compton, Nature, vol. 350, 91-92 (1991)] the contents of which are incorporated herein by reference in their entirety. A target RNA is used as a template and a reverse transcriptase synthesizes its complementary DNA strand. RNAse H hydrolyzes the RNA template, making space for a DNA polymerase to synthesize a DNA strand complementary to the first DNA strand which is complementary to the RNA target, forming a DNA duplex. T7 RNA polymerase continuously generates complementary RNA strands of this DNA duplex. These RNA strands act as templates for new cycles of DNA synthesis, resulting in amplification of the target gene.

[0641] Rolling-circle amplification (RCA) amplifies a single stranded circular polynucleotide and involves numerous rounds of isothermal enzymatic synthesis where D29 DNA polymerase extends a primer by continuously progressing around the polynucleotide circle to replicate its sequence over and over again. Therefore, a linear copy of the circular template is achieved. A primer can then be annealed to this linear copy and its complementary chain can be synthesized. [See Lizardi et al., Nature Genetics, vol. 19, 225-232 (1998)] the contents of which are incorporated herein by reference in their entirety. A single stranded circular DNA can also serve as a template for RNA synthesis in the presence of an RNA polymerase. (Daubendiek et al., JACS, vol. 117, 7818-7819 (1995), the contents of which are incorporated herein by reference in their entirety). An inverse rapid amplification of cDNA ends (RACE) RCA is described by Polidoros et al. A messenger RNA (mRNA) is reverse transcribed into cDNA, followed by RNAse H treatment to separate the cDNA. The cDNA is then circularized by CircLigase into a circular DNA. The amplification of the resulting circular DNA is achieved with RCA. (Polidoros et al., BioTechniques, vol. 41, 35-42 (2006), the contents of which are incorporated herein by reference in their entirety).

[0642] Any of the foregoing methods can be utilized in the manufacture of one or more regions of the polynucleotides of the present disclosure.

[0643] Assembling polynucleotides or nucleic acids by a ligase is also widely used. DNA or RNA ligases promote intermolecular ligation of the 5′ and 3′ ends of polynucleotide chains through the formation of a phosphodiester bond. Ligase chain reaction (LCR) is a promising diagnosing technique based on the principle that two adjacent polynucleotide probes hybridize to one strand of a target gene and couple to each other by a ligase. If a target gene is not present, or if there is a mismatch at the target gene, such as a single-nucleotide polymorphism (SNP), the probes cannot ligase. (Wiedmann et al., PCR Methods and Application, vol. 3 (4), s51-s64 (1994), the contents of which are incorporated herein by reference in their entirety). LCR can be combined with various amplification techniques to increase sensitivity of detection or to increase the amount of products if it is used in synthesizing polynucleotides and nucleic acids.

[0644] Several library preparation kits for nucleic acids are now commercially available. They include enzymes and buffers to convert a small amount of nucleic acid samples into an indexed library for downstream applications. For example, DNA fragments can be placed in a NEBNEXT® ULTRA™ DNA Library Prep Kit by NEWENGLAND BIOLABS® for end preparation, ligation, size selection, clean-up, PCR amplification and final clean-up.

[0645] Continued development is going on to improvement the amplification techniques. For example, U.S. Pat. No. 8,367,328 to Asada et al. the contents of which are incorporated herein by reference in their entirety, teaches utilizing a reaction enhancer to increase the efficiency of DNA synthesis reactions by DNA polymerases. The reaction enhancer comprises an acidic substance or cationic complexes of an acidic substance. U.S. Pat. No. 7,384,739 to Kitabayashi et al. the contents of which are incorporated herein by reference in their entirety, teaches a carboxylate ion-supplying substance that promotes enzymatic DNA synthesis, wherein the carboxylate ion-supplying substance is selected from oxalic acid, malonic acid, esters of oxalic acid, esters of malonic acid, salts of malonic acid, and esters of maleic acid. U.S. Pat. No. 7,378,262 to Sobek et al. the contents of which are incorporated herein by reference in their entirety, discloses an enzyme composition to increase fidelity of DNA amplifications. The composition comprises one enzyme with 3′ exonuclease activity but no polymerase activity and another enzyme that is a polymerase. Both of the enzymes are thermostable and are reversibly modified to be inactive at lower temperatures.

[0646] U.S. Pat. No. 7,550,264 to Getts et al. teaches multiple round of synthesis of sense RNA molecules are performed by attaching oligodeoxynucleotides tails onto the 3′ end of cDNA molecules and initiating RNA transcription using RNA polymerase, the contents of which are incorporated herein by reference in their entirety. US Pat. Publication No. 2013/0183718 to Rohayem teaches RNA synthesis by RNA-dependent RNA polymerases (RdRp) displaying an RNA polymerase activity on single-stranded DNA templates, the contents of which are incorporated herein by reference in their entirety. Oligonucleotides with non-standard nucleotides can be synthesized with enzymatic polymerization by contacting a template comprising non-standard nucleotides with a mixture of nucleotides that are complementary to the nucleotides of the template as disclosed in U.S. Pat. No. 6,617,106 to Benner, the contents of which are incorporated herein by reference in their entirety.

### Chemical Synthesis

[0647] Standard methods can be applied to synthesize an isolated polynucleotide sequence encoding an isolated polypeptide of interest. For example, a single DNA or RNA oligomer containing a codon-optimized nucleotide sequence coding for the particular isolated polypeptide can be synthesized. In other aspects, several small oligonucleotides coding for portions of the desired polypeptide can be synthesized and then ligated. In some aspects, the individual oligonucleotides typically contain 5′ or 3′ overhangs for complementary assembly.

[0648] A polynucleotide disclosed herein (e.g., mRNA) can be chemically synthesized using chemical synthesis methods and potential nucleobase substitutions known in the art. See, for example, International Publication Nos. WO2014093924, WO2013052523; WO2013039857, WO2012135805, WO2013151671; U.S. Publ. No. US20130115272; or U.S. Pat. No. 8,999,380, U.S. Pat. No. 8,710,200, all of which are herein incorporated by reference in their entireties.

### V. Purification and Quantitation of Polynucleotides

### Purification

[0649] Purification of the polynucleotides described herein (i.e., a polynucleotide comprising an ORF encoding an MCM polypeptide) can include, but is not limited to, polynucleotide clean-up, quality assurance and quality control. Clean-up can be performed by methods known in the arts such as, but not limited to, AGENCOURT® beads (Beckman Coulter Genomics, Danvers, Mass.), poly-T beads, LNA™ oligo-T capture probes (EXIQON® Inc., Vedbaek, Denmark) or HPLC based purification methods such as, but not limited to, strong anion exchange HPLC, weak anion exchange HPLC, reverse phase HPLC (RP-HPLC), and hydrophobic interaction HPLC (HIC-HPLC). The term “purified” when used in relation to a polynucleotide such as a “purified polynucleotide” refers to one that is separated from at least one contaminant. As used herein, a “contaminant” is any substance that makes another unfit, impure or inferior. Thus, a purified polynucleotide (e.g., DNA and RNA) is present in a form or setting different from that in which it is found in nature, or a form or setting different from that which existed prior to subjecting it to a treatment or purification method.

[0650] In some embodiments, purification of a polynucleotide of the disclosure removes impurities that can reduce or remove an unwanted immune response, e.g., reducing cytokine activity.

[0651] In some embodiments, the polynucleotide of the disclosure is purified prior to administration using column chromatography (e.g., strong anion exchange HPLC, weak anion exchange HPLC, reverse phase HPLC (RP-HPLC), and hydrophobic interaction HPLC (HIC-HPLC), or (LCMS)). In some embodiments, a column chromatography (e.g., strong anion exchange HPLC, weak anion exchange HPLC, reverse phase HPLC (RP-HPLC), and hydrophobic interaction HPLC (HIC-HPLC), or (LCMS)) purified polynucleotide, that encodes an MCM polypeptide disclosed herein increases expression of MCM compared to polynucleotides encoding MCM purified by a different purification method. In some embodiments, a column chromatography (e.g., strong anion exchange HPLC, weak anion exchange HPLC, reverse phase HPLC (RP-HPLC), and hydrophobic interaction HPLC (HIC-HPLC), or (LCMS)) purified polynucleotide encodes an MCM polypeptide or functional fragment thereof comprising one or more of the point mutations V69, T499, H532, A598, and V671. In some embodiments, the RP-HPLC purified polynucleotide increases MCM expression (e.g., by 20-50%, at least 20%, at least 25%, at least 30%, at least 35%, at least 40%, at least 45%, or at least 50%).

[0652] A quality assurance and/or quality control check can be conducted using methods such as, but not limited to, gel electrophoresis, UV absorbance, or analytical HPLC.

[0653] In another embodiment, the polynucleotides can be sequenced by methods including, but not limited to reverse-transcriptase-PCR.

### Quantification

[0654] In some embodiments, the polynucleotides of the present disclosure (i.e., a polynucleotide comprising an ORF encoding an MCM polypeptide) can be quantified in exosomes or when derived from one or more bodily fluid. As used herein “bodily fluids” include peripheral blood, serum, plasma, ascites, urine, cerebrospinal fluid (CSF), sputum, saliva, bone marrow, synovial fluid, aqueous humor, amniotic fluid, cerumen, breast milk, broncheoalveolar lavage fluid, semen, prostatic fluid, cowper's fluid or pre-ejaculatory fluid, sweat, fecal matter, hair, tears, cyst fluid, pleural and peritoneal fluid, pericardial fluid, lymph, chyme, chyle, bile, interstitial fluid, menses, pus, sebum, vomit, vaginal secretions, mucosal secretion, stool water, pancreatic juice, lavage fluids from sinus cavities, bronchopulmonary aspirates, blastocyl cavity fluid, and umbilical cord blood. Alternatively, exosomes can be retrieved from an organ selected from the group consisting of lung, heart, pancreas, stomach, intestine, bladder, kidney, ovary, testis, skin, colon, breast, prostate, brain, esophagus, liver, and placenta.

[0655] In the exosome quantification method, a sample of not more than 2 mL is obtained from the subject and the exosomes isolated by size exclusion chromatography, density gradient centrifugation, differential centrifugation, nanomembrane ultrafiltration, immunoabsorbent capture, affinity purification, microfluidic separation, or combinations thereof. In the analysis, the level or concentration of a polynucleotide can be an expression level, presence, absence, truncation or alteration of the administered construct. It is advantageous to correlate the level with one or more clinical phenotypes or with an assay for a human disease biomarker. The assay can be performed using construct specific probes, cytometry, qRT-PCR, real-time PCR, PCR, flow cytometry, electrophoresis, mass spectrometry, or combinations thereof while the exosomes can be isolated using immunohistochemical methods such as enzyme linked immunosorbent assay (ELISA) methods. Exosomes can also be isolated by size exclusion chromatography, density gradient centrifugation, differential centrifugation, nanomembrane ultrafiltration, immunoabsorbent capture, affinity purification, microfluidic separation, or combinations thereof.

[0656] These methods afford the investigator the ability to monitor, in real time, the level of polynucleotides remaining or delivered. This is possible because the polynucleotides of the present disclosure differ from the endogenous forms due to the structural or chemical modifications.

[0657] In some embodiments, the polynucleotide can be quantified using methods such as, but not limited to, ultraviolet visible spectroscopy (UV/Vis). A non-limiting example of a UV/Vis spectrometer is a NANODROP® spectrometer (ThermoFisher, Waltham, Mass.). The quantified polynucleotide can be analyzed in order to determine if the polynucleotide can be of proper size, check that no degradation of the polynucleotide has occurred. Degradation of the polynucleotide can be checked by methods such as, but not limited to, agarose gel electrophoresis, HPLC based purification methods such as, but not limited to, strong anion exchange HPLC, weak anion exchange HPLC, reverse phase HPLC (RP-HPLC), and hydrophobic interaction HPLC (HIC-HPLC), liquid chromatography-mass spectrometry (LCMS), capillary electrophoresis (CE) and capillary gel electrophoresis (CGE).

### VI. Pharmaceutical Compositions

[0658] The disclosure includes pharmaceutical compositions that comprise the polynucleotide described herein, i.e., a polynucleotide comprising an ORF encoding an MCM polypeptide. In some embodiments, the formulation can contain polynucleotide encoding wild type MCM or MCM comprising a nucleotide sequence having significant sequence similarity to a polynucleotide selected from the group of SEQ ID NOs: 1-207, 732-765, and 772, wherein the ORF encodes an MCM polypeptide.

[0659] Pharmaceutical compositions can optionally comprise one or more additional active substances, e.g., therapeutically and/or prophylactically active substances. Pharmaceutical compositions of the present disclosure can be sterile and/or pyrogen-free. General considerations in the formulation and/or manufacture of pharmaceutical agents can be found, for example, in Remington: The Science and Practice of Pharmacy 21^{st} ed., Lippincott Williams & Wilkins, 2005 (incorporated herein by reference in its entirety). For the purposes of the present disclosure, the phrase “active ingredient” generally refers to polynucleotides to be delivered as described herein.

[0660] Formulations of the pharmaceutical compositions described herein can be prepared by any method known or hereafter developed in the art of pharmacology. In general, such preparatory methods include the step of associating the active ingredient with an excipient and/or one or more other accessory ingredients.

[0661] A pharmaceutical composition in accordance with the present disclosure can be prepared, packaged, and/or sold in bulk, as a single unit dose, and/or as a plurality of single unit doses. As used herein, a “unit dose” refers to a discrete amount of the pharmaceutical composition comprising a predetermined amount of the active ingredient. The amount of the active ingredient is generally equal to the dosage of the active ingredient that would be administered to a subject and/or a convenient fraction of such a dosage such as, for example, one-half or one-third of such a dosage.

[0662] Relative amounts of the active ingredient, the pharmaceutically acceptable excipient, and/or any additional ingredients in a pharmaceutical composition in accordance with the present disclosure can vary, depending upon the identity, size, and/or condition of the subject being treated and further depending upon the route by which the composition is to be administered. For example, the composition can comprise between 0.1% and 99% (w/w) of the active ingredient. By way of example, the composition can comprise between 0.1% and 100%, e.g., between 0.5 and 50%, between 1-30%, between 5-80%, at least 80% (w/w) active ingredient.

[0663] In some embodiments, the formulations described herein can contain at least one polynucleotide. As a non-limiting example, the formulations can contain 1, 2, 3, 4 or 5 polynucleotides.

[0664] In some embodiments, the formulations described herein can comprise more than one type of polynucleotide. In some embodiments, the formulation can comprise a polynucleotide in linear and circular form. In another embodiment, the formulation can comprise a circular polynucleotide and an IVT polynucleotide. In yet another embodiment, the formulation can comprise an IVT polynucleotide, a chimeric polynucleotide and a circular polynucleotide.

[0665] In some embodiments, compositions are administered to humans, human patients or subjects. Although the descriptions of pharmaceutical compositions provided herein are principally directed to pharmaceutical compositions that are suitable for administration to humans, it will be understood by the skilled artisan that such compositions are generally suitable for administration to any other animal, e.g., to non-human animals, e.g. non-human mammals. Modification of pharmaceutical compositions suitable for administration to humans in order to render the compositions suitable for administration to various animals is well understood, and the ordinarily skilled veterinary pharmacologist can design and/or perform such modification with merely ordinary, if any, experimentation. Subjects to which administration of the pharmaceutical compositions is contemplated include, but are not limited to, humans and/or other primates; mammals, including commercially relevant mammals such as cattle, pigs, horses, sheep, cats, dogs, mice, and/or rats; and/or birds, including commercially relevant birds such as poultry, chickens, ducks, geese, and/or turkeys.

### Delivery Agents

[0666] a. Lipid Compound

[0667] The present disclosure provides pharmaceutical compositions with advantageous properties. In particular, the present application provides pharmaceutical compositions comprising:

[0668] (a) a polynucleotide comprising an ORF encoding an MCM polypeptide; and

[0669] (b) a lipid compound having the formula (I)

[chemical structure]

[0670] wherein

[0671] R₁ is selected from the group consisting of C₅₋₂₀ alkyl, C₅₋₂₀ alkenyl, —R*YR″, —YR″, and —R″M′R′;

[0672] R₂ and R₃ are independently selected from the group consisting of H, C₁₋₁₄ alkyl, C₂₋₁₄ alkenyl, —R*YR″, —YR″, and —R*OR″, or R₂ and R₃, together with the atom to which they are attached, form a heterocycle or carbocycle;

[0673] R₄ is selected from the group consisting of a C₃₋₆ carbocycle, —(CH₂)ₙQ, —(CH₂)ₙCHQR, —CHQR, —CQ(R)₂, and unsubstituted C₁₋₆ alkyl, where Q is selected from a carbocycle, heterocycle, —OR, —O(CH₂)ₙN(R)₂, —C(O)OR, —OC(O)R, —CX₃, —CX₂H, —CXH₂, —CN, —N(R)₂, —C(O)N(R)₂, —N(R)C(O)R, —N(R)S(O)₂R, —N(R)C(O)N(R)₂, —N(R)C(S)N(R)₂, and —C(R)N(R)₂C(O)OR, and each n is independently selected from 1, 2, 3, 4, and 5;

[0674] each R₅ is independently selected from the group consisting of C₁₋₃ alkyl, C₂₋₃ alkenyl, and H;

[0675] each R₆ is independently selected from the group consisting of C₁₋₃ alkyl, C₂₋₃ alkenyl, and H;

[0676] M and M′ are independently selected from —C(O)O—, —OC(O)—, —C(O)N(R′)—, —N(R′)C(O)—, —C(O)—, —C(S)—, —C(S)S—, —SC(S)—, —CH(OH)—, —P(O)(OR′)O—, —S(O)₂—, an aryl group, and a heteroaryl group;

[0677] R₇ is selected from the group consisting of C₁₋₃ alkyl, C₂₋₃ alkenyl, and H;

[0678] each R is independently selected from the group consisting of C₁₋₃ alkyl, C₂₋₃ alkenyl, and H;

[0679] each R′ is independently selected from the group consisting of C₁₋₁₈ alkyl, C₂₋₁₈ alkenyl, —R*YR″, —YR″, and H;

[0680] each R″ is independently selected from the group consisting of C₃₋₁₄ alkyl and C₃₋₁₄ alkenyl;

[0681] each R* is independently selected from the group consisting of C₁₋₁₂ alkyl and C₂₋₁₂ alkenyl;

[0682] each Y is independently a C₃₋₆ carbocycle;

[0683] each X is independently selected from the group consisting of F, Cl, Br, and I; and m is selected from 5, 6, 7, 8, 9, 10, 11, 12, and 13,

[0684] or salts or stereoisomers thereof, wherein alkyl and alkenyl groups can be linear or branched.

[0685] In some embodiments, a subset of compounds of Formula (I) includes those in which when R₄ is —(CH₂)ₙQ, —(CH₂)ₙCHQR, —CHQR, or —CQ(R)₂, then (i) Q is not —N(R)₂ when n is 1, 2, 3, 4 or 5, or (ii) Q is not 5, 6, or 7-membered heterocycloalkyl when n is 1 or 2.

[0686] In another embodiments, another subset of compounds of Formula (I) includes those in which

[0687] R₁ is selected from the group consisting of C₅₋₂₀ alkyl, C₅₋₂₀ alkenyl, —R*YR″, —YR″, and —R″M′R′;

[0688] R₂ and R₃ are independently selected from the group consisting of H, C₁₋₁₄ alkyl, C₂₋₁₄ alkenyl, —R*YR″, —YR″, and —R*OR″, or R₂ and R₃, together with the atom to which they are attached, form a heterocycle or carbocycle;

[0689] R₄ is selected from the group consisting of a C₃₋₆ carbocycle, —(CH₂)ₙQ, —(CH₂)ₙCHQR, —CHQR, —CQ(R)₂, and unsubstituted C₁₋₆ alkyl, where Q is selected from a C₃₋₆ carbocycle, a 5- to 14-membered heteroaryl having one or more heteroatoms selected from N, O, and S, —OR, —O(CH₂)ₙN(R)₂, —C(O)OR, —OC(O)R, —CX₃, —CX₂H, —CXH₂, —CN, —C(O)N(R)₂, —N(R)C(O)R, —N(R)S(O)₂R, —N(R)C(O)N(R)₂, —N(R)C(S)N(R)₂, —CRN(R)₂C(O)OR, and a 5- to 14-membered heterocycloalkyl having one or more heteroatoms selected from N, O, and S which is substituted with one or more substituents selected from oxo (═O), OH, amino, and C₁₋₃ alkyl, and each n is independently selected from 1, 2, 3, 4, and 5;

[0690] each R₅ is independently selected from the group consisting of C₁₋₃ alkyl, C₂₋₃ alkenyl, and H;

[0691] each R₆ is independently selected from the group consisting of C₁₋₃ alkyl, C₂₋₃ alkenyl, and H;

[0692] M and M′ are independently selected from —C(O)O—, —OC(O)—, —C(O)N(R′)—, —N(R′)C(O)—, —C(O)—, —C(S)—, —C(S)S—, —SC(S)—, —CH(OH)—, —P(O)(OR′)O—, —S(O)₂—, an aryl group, and a heteroaryl group;

[0693] R₇ is selected from the group consisting of C₁₋₃ alkyl, C₂₋₃ alkenyl, and H;

[0694] each R is independently selected from the group consisting of C₁₋₃ alkyl, C₂₋₃ alkenyl, and H;

[0695] each R′ is independently selected from the group consisting of C₁₋₁₈ alkyl, C₂₋₁₈ alkenyl, —R*YR″, —YR″, and H;

[0696] each R″ is independently selected from the group consisting of C₃₋₁₄ alkyl and C₃₋₁₄ alkenyl;

[0697] each R* is independently selected from the group consisting of C₁₋₁₂ alkyl and C₂₋₁₂ alkenyl;

[0698] each Y is independently a C₃₋₆ carbocycle;

[0699] each X is independently selected from the group consisting of F, Cl, Br, and I; and

[0700] m is selected from 5, 6, 7, 8, 9, 10, 11, 12, and 13,

[0701] or salts or stereoisomers thereof.

[0702] In yet another embodiments, another subset of compounds of Formula (I) includes those in which

[0703] R₁ is selected from the group consisting of C₅₋₂₀ alkyl, C₅₋₂₀ alkenyl, —R*YR″, —YR″, and —R″M′R′;

[0704] R₂ and R₃ are independently selected from the group consisting of H, C₁₋₁₄ alkyl, C₂₋₁₄ alkenyl, —R*YR″, —YR″, and —R*OR″, or R₂ and R₃, together with the atom to which they are attached, form a heterocycle or carbocycle;

[0705] R₄ is selected from the group consisting of a C₃₋₆ carbocycle, —(CH₂)ₙQ, —(CH₂)ₙCHQR, —CHQR, —CQ(R)₂, and unsubstituted C₁₋₆ alkyl, where Q is selected from a C₃₋₆ carbocycle, a 5- to 14-membered heterocycle having one or more heteroatoms selected from N, O, and S, —OR, —O(CH₂)ₙN(R)₂, —C(O)OR, —OC(O)R, —CX₃, —CX₂H, —CXH₂, —CN, —C(O)N(R)₂, —N(R)C(O)R, —N(R)S(O)₂R, —N(R)C(O)N(R)₂, —N(R)C(S)N(R)₂, —CRN(R)₂C(O)OR, and each n is independently selected from 1, 2, 3, 4, and 5; and when Q is a 5- to 14-membered heterocycle and (i) R₄ is —(CH₂)ₙQ in which n is 1 or 2, or (ii) R₄ is —(CH₂)ₙCHQR in which n is 1, or (iii) R₄ is —CHQR, and —CQ(R)₂, then Q is either a 5- to 14-membered heteroaryl or 8- to 14-membered heterocycloalkyl;

[0706] each R₅ is independently selected from the group consisting of C₁₋₃ alkyl, C₂₋₃ alkenyl, and H;

[0707] each R₆ is independently selected from the group consisting of C₁₋₃ alkyl, C₂₋₃ alkenyl, and H;

[0708] M and M′ are independently selected from —C(O)O—, —OC(O)—, —C(O)N(R′)—, —N(R′)C(O)—, —C(O)—, —C(S)—, —C(S)S—, —SC(S)—, —CH(OH)—, —P(O)(OR′)O—, —S(O)₂—, an aryl group, and a heteroaryl group;

[0709] R₇ is selected from the group consisting of C₁₋₃ alkyl, C₂₋₃ alkenyl, and H;

[0710] each R is independently selected from the group consisting of C₁₋₃ alkyl, C₂₋₃ alkenyl, and H;

[0711] each R′ is independently selected from the group consisting of C₁₋₁₈ alkyl, C₂₋₁₈ alkenyl, —R*YR″, —YR″, and H;

[0712] each R″ is independently selected from the group consisting of C₃₋₁₄ alkyl and C₃₋₁₄ alkenyl;

[0713] each R* is independently selected from the group consisting of C₁₋₁₂ alkyl and C₂₋₁₂ alkenyl;

[0714] each Y is independently a C₃₋₆ carbocycle;

[0715] each X is independently selected from the group consisting of F, Cl, Br, and I; and

[0716] m is selected from 5, 6, 7, 8, 9, 10, 11, 12, and 13,

[0717] or salts or stereoisomers thereof.

[0718] In still another embodiments, another subset of compounds of Formula (I) includes those in which

[0719] R₁ is selected from the group consisting of C₅₋₂₀ alkyl, C₅₋₂₀ alkenyl, —R*YR″, —YR″, and —R″M′R′;

[0720] R₂ and R₃ are independently selected from the group consisting of H, C₁₋₁₄ alkyl, C₂₋₁₄ alkenyl, —R*YR″, —YR″, and —R*OR″, or R₂ and R₃, together with the atom to which they are attached, form a heterocycle or carbocycle;

[0721] R₄ is selected from the group consisting of a C₃₋₆ carbocycle, —(CH₂)ₙQ, —(CH₂)ₙCHQR, —CHQR, —CQ(R)₂, and unsubstituted C₁₋₆ alkyl, where Q is selected from a C₃₋₆ carbocycle, a 5- to 14-membered heteroaryl having one or more heteroatoms selected from N, O, and S, —OR, —O(CH₂)ₙN(R)₂, —C(O)OR, —OC(O)R, —CX₃, —CX₂H, —CXH₂, —CN, —C(O)N(R)₂, —N(R)C(O)R, —N(R)S(O)₂R, —N(R)C(O)N(R)₂, —N(R)C(S)N(R)₂, —CRN(R)₂C(O)OR, and each n is independently selected from 1, 2, 3, 4, and 5;

[0722] each R₅ is independently selected from the group consisting of C₁₋₃ alkyl, C₂₋₃ alkenyl, and H;

[0723] each R₆ is independently selected from the group consisting of C₁₋₃ alkyl, C₂₋₃ alkenyl, and H;

[0724] M and M′ are independently selected from —C(O)O—, —OC(O)—, —C(O)N(R′)—, —N(R′)C(O)—, —C(O)—, —C(S)—, —C(S)S—, —SC(S)—, —CH(OH)—, —P(O)(OR′)O—, —S(O)₂—, an aryl group, and a heteroaryl group;

[0725] R₇ is selected from the group consisting of C₁₋₃ alkyl, C₂₋₃ alkenyl, and H;

[0726] each R is independently selected from the group consisting of C₁₋₃ alkyl, C₂₋₃ alkenyl, and H;

[0727] each R′ is independently selected from the group consisting of C₁₋₁₈ alkyl, C₂₋₁₈ alkenyl, —R*YR″, —YR″, and H;

[0728] each R″ is independently selected from the group consisting of C₃₋₁₄ alkyl and C₃₋₁₄ alkenyl;

[0729] each R* is independently selected from the group consisting of C₁₋₁₂ alkyl and C₂₋₁₂ alkenyl;

[0730] each Y is independently a C₃₋₆ carbocycle;

[0731] each X is independently selected from the group consisting of F, Cl, Br, and I; and

[0732] m is selected from 5, 6, 7, 8, 9, 10, 11, 12, and 13,

[0733] or salts or stereoisomers thereof.

[0734] In yet another embodiments, another subset of compounds of Formula (I) includes those in which

[0735] R₁ is selected from the group consisting of C₅₋₂₀ alkyl, C₅₋₂₀ alkenyl, —R*YR″, —YR″, and —R″M′R′;

[0736] R₂ and R₃ are independently selected from the group consisting of H, C₂₋₁₄ alkyl, C₂₋₁₄ alkenyl, —R*YR″, —YR″, and —R*OR″, or R₂ and R₃, together with the atom to which they are attached, form a heterocycle or carbocycle;

[0737] R₄ is —(CH₂)ₙQ or —(CH₂)ₙCHQR, where Q is —N(R)₂, and n is selected from 3, 4, and 5;

[0738] each R₅ is independently selected from the group consisting of C₁₋₃ alkyl, C₂₋₃ alkenyl, and H;

[0739] each R₆ is independently selected from the group consisting of C₁₋₃ alkyl, C₂₋₃ alkenyl, and H;

[0740] M and M′ are independently selected from —C(O)O—, —OC(O)—, —C(O)N(R′)—, —N(R′)C(O)—, —C(O)—, —C(S)—, —C(S)S—, —SC(S)—, —CH(OH)—, —P(O)(OR′)O—, —S(O)₂—, an aryl group, and a heteroaryl group;

[0741] R₇ is selected from the group consisting of C₁₋₃ alkyl, C₂₋₃ alkenyl, and H;

[0742] each R is independently selected from the group consisting of C₁₋₃ alkyl, C₂₋₃ alkenyl, and H;

[0743] each R′ is independently selected from the group consisting of C₁₋₁₈ alkyl, C₂₋₁₈ alkenyl, —R*YR″, —YR″, and H;

[0744] each R″ is independently selected from the group consisting of C₃₋₁₄ alkyl and C₃₋₁₄ alkenyl;

[0745] each R* is independently selected from the group consisting of C₁₋₁₂ alkyl and C₁₋₁₂ alkenyl;

[0746] each Y is independently a C₃₋₆ carbocycle;

[0747] each X is independently selected from the group consisting of F, Cl, Br, and I; and

[0748] m is selected from 5, 6, 7, 8, 9, 10, 11, 12, and 13,

[0749] or salts or stereoisomers thereof.

[0750] In still another embodiments, another subset of compounds of Formula (I) includes those in which

[0751] R₁ is selected from the group consisting of C₅₋₂₀ alkyl, C₅₋₂₀ alkenyl, —R*YR″, —YR″, and —R″M′R′;

[0752] R₂ and R₃ are independently selected from the group consisting of C₁₋₁₄ alkyl, C₂₋₁₄ alkenyl, —R*YR″, —YR″, and —R*OR″, or R₂ and R₃, together with the atom to which they are attached, form a heterocycle or carbocycle;

[0753] R₄ is selected from the group consisting of —(CH₂)ₙQ, —(CH₂)ₙCHQR, —CHQR, and —CQ(R)₂, where Q is —N(R)₂, and n is selected from 1, 2, 3, 4, and 5;

[0754] each R₅ is independently selected from the group consisting of C₁₋₃ alkyl, C₂₋₃ alkenyl, and H;

[0755] each R₆ is independently selected from the group consisting of C₁₋₃ alkyl, C₂₋₃ alkenyl, and H;

[0756] M and M′ are independently selected from —C(O)O—, —OC(O)—, —C(O)N(R′)—, —N(R′)C(O)—, —C(O)—, —C(S)—, —C(S)S—, —SC(S)—, —CH(OH)—, —P(O)(OR′)O—, —S(O)₂—, an aryl group, and a heteroaryl group;

[0757] R₇ is selected from the group consisting of C₁₋₃ alkyl, C₂₋₃ alkenyl, and H;

[0758] each R is independently selected from the group consisting of C₁₋₃ alkyl, C₂₋₃ alkenyl, and H;

[0759] each R′ is independently selected from the group consisting of C₁₋₁₈ alkyl, C₂₋₁₈ alkenyl, —R*YR″, —YR″, and H;

[0760] each R″ is independently selected from the group consisting of C₃₋₁₄ alkyl and C₃₋₁₄ alkenyl;

[0761] each R* is independently selected from the group consisting of C₁₋₁₂ alkyl and C₁₋₁₂ alkenyl;

[0762] each Y is independently a C₃₋₆ carbocycle;

[0763] each X is independently selected from the group consisting of F, Cl, Br, and I; and

[0764] m is selected from 5, 6, 7, 8, 9, 10, 11, 12, and 13,

[0765] or salts or stereoisomers thereof.

[0766] In certain embodiments, a subset of compounds of Formula (I) includes those of Formula (IA):

[chemical structure]

[0767] or a salt or stereoisomer thereof, wherein l is selected from 1, 2, 3, 4, and 5; m is selected from 5, 6, 7, 8, and 9; M₁ is a bond or M′; R₄ is unsubstituted C₁₋₃ alkyl, or —(CH₂)ₙQ, in which Q is OH, —NHC(S)N(R)₂, or —NHC(O)N(R)₂; M and M′ are independently selected from —C(O)O—, —OC(O)—, —C(O)N(R′)—, —P(O)(OR′)O—, an aryl group, and a heteroaryl group; and

[0768] R₂ and R₃ are independently selected from the group consisting of H, C₁₋₁₄ alkyl, and C₂₋₁₄ alkenyl.

[0769] In certain embodiments, a subset of compounds of Formula (I) includes those of Formula (II):

[chemical structure]

[0770] or a salt or stereoisomer thereof, wherein l is selected from 1, 2, 3, 4, and 5; M₁ is a bond or M′; R₄ is unsubstituted C₁₋₃ alkyl, or —(CH₂)ₙQ, in which n is 2, 3, or 4, and Q is OH, —NHC(S)N(R)₂, or —NHC(O)N(R)₂; M and M′ are independently selected from —C(O)O—, —OC(O)—, —C(O)N(R′)—, —P(O)(OR′)O—, an aryl group, and a heteroaryl group; and R₂ and R₃ are independently selected from the group consisting of H, C₁₋₁₄ alkyl, and C₂₋₁₄ alkenyl.

[0771] In some embodiments, the compound of formula (I) is of the formula (IIa),

[chemical structure]

or a salt thereof, wherein R₄ is as described above.

[0772] In some embodiments, the compound of formula (I) is of the formula (IIb),

[chemical structure]

or a salt thereof, wherein R₄ is as described above.

[0773] In some embodiments, the compound of formula (I) is of the formula (IIc),

[chemical structure]

or a salt thereof, wherein R₄ is as described above.

[0774] In some embodiments, the compound of formula (I) is of the formula (IIe):

[chemical structure]

or a salt thereof, wherein R₄ is as described above.

[0775] In some embodiments, the compound of formula (IIa), (IIb), (IIc), or (IIe) comprises an R₄ which is selected from —(CH₂)ₙQ and —(CH₂)ₙCHQR, wherein Q, R and n are as defined above.

[0776] In some embodiments, Q is selected from the group consisting of —OR, —OH, —O(CH₂)ₙN(R)₂, —OC(O)R, —CX₃, —CN, —N(R)C(O)R, —N(H)C(O)R, —N(R)S(O)₂R, —N(H)S(O)₂R, —N(R)C(O)N(R)₂, —N(H)C(O)N(R)₂, —N(H)C(O)N(H)(R), —N(R)C(S)N(R)₂, —N(H)C(S)N(R)₂, —N(H)C(S)N(H)(R), and a heterocycle, wherein R is as defined above. In some aspects, n is 1 or 2. In some embodiments, Q is OH, —NHC(S)N(R)₂, or —NHC(O)N(R)₂.

[0777] In some embodiments, the compound of formula (I) is of the formula (IId),

[chemical structure]

[0778] or a salt thereof, wherein R₂ and R₃ are independently selected from the group consisting of C₅₋₁₄ alkyl and C₅₋₁₄ alkenyl, n is selected from 2, 3, and 4, and R′, R″, R₅, R₆ and m are as defined above.

[0779] In some aspects of the compound of formula (IId), R₂ is C₈ alkyl. In some aspects of the compound of formula (IId), R₃ is C₅-C₉ alkyl. In some aspects of the compound of formula (IId), m is 5, 7, or 9. In some aspects of the compound of formula (IId), each R₅ is H. In some aspects of the compound of formula (IId), each R₆ is H.

[0780] In another aspect, the present application provides a lipid composition (e.g., a lipid nanoparticle (LNP)) comprising: (1) a compound having the formula (I); (2) optionally a helper lipid (e.g. a phospholipid); (3) optionally a structural lipid (e.g. a sterol); (4) optionally a lipid conjugate (e.g. a PEG-lipid); and (5) optionally a quaternary amine compound. In exemplary embodiments, the lipid composition (e.g., LNP) further comprises a polynucleotide encoding an MCM polypeptide, e.g., a polynucleotide encapsulated therein.

[0781] As used herein, the term “alkyl” or “alkyl group” means a linear or branched, saturated hydrocarbon including one or more carbon atoms (e.g., one, two, three, four, five, six, seven, eight, nine, ten, eleven, twelve, thirteen, fourteen, fifteen, sixteen, seventeen, eighteen, nineteen, twenty, or more carbon atoms).

[0782] The notation “C₁₋₁₄ alkyl” means a linear or branched, saturated hydrocarbon including 1-14 carbon atoms. An alkyl group can be optionally substituted.

[0783] As used herein, the term “alkenyl” or “alkenyl group” means a linear or branched hydrocarbon including two or more carbon atoms (e.g., two, three, four, five, six, seven, eight, nine, ten, eleven, twelve, thirteen, fourteen, fifteen, sixteen, seventeen, eighteen, nineteen, twenty, or more carbon atoms) and at least one double bond.

[0784] The notation “C₂₋₁₄ alkenyl” means a linear or branched hydrocarbon including 2-14 carbon atoms and at least one double bond. An alkenyl group can include one, two, three, four, or more double bonds. For example, C₁₈ alkenyl can include one or more double bonds. A C₁₈ alkenyl group including two double bonds can be a linoleyl group. An alkenyl group can be optionally substituted.

[0785] As used herein, the term “carbocycle” or “carbocyclic group” means a mono- or multi-cyclic system including one or more rings of carbon atoms. Rings can be three, four, five, six, seven, eight, nine, ten, eleven, twelve, thirteen, fourteen, or fifteen membered rings.

[0786] The notation “C₃₋₆ carbocycle” means a carbocycle including a single ring having 3-6 carbon atoms. Carbocycles can include one or more double bonds and can be aromatic (e.g., aryl groups). Examples of carbocycles include cyclopropyl, cyclopentyl, cyclohexyl, phenyl, naphthyl, and 1,2-dihydronaphthyl groups. Carbocycles can be optionally substituted.

[0787] As used herein, the term “heterocycle” or “heterocyclic group” means a mono- or multi-cyclic system including one or more rings, where at least one ring includes at least one heteroatom. Heteroatoms can be, for example, nitrogen, oxygen, or sulfur atoms. Rings can be three, four, five, six, seven, eight, nine, ten, eleven, or twelve membered rings. Heterocycles can include one or more double bonds and can be aromatic (e.g., heteroaryl groups). Examples of heterocycles include imidazolyl, imidazolidinyl, oxazolyl, oxazolidinyl, thiazolyl, thiazolidinyl, pyrazolidinyl, pyrazolyl, isoxazolidinyl, isoxazolyl, isothiazolidinyl, isothiazolyl, morpholinyl, pyrrolyl, pyrrolidinyl, furyl, tetrahydrofuryl, thiophenyl, pyridinyl, piperidinyl, quinolyl, and isoquinolyl groups. Heterocycles can be optionally substituted.

[0788] As used herein, a “biodegradable group” is a group that can facilitate faster metabolism of a lipid in a subject. A biodegradable group can be, but is not limited to, —C(O)O—, —OC(O)—, —C(O)N(R′)—, —N(R′)C(O)—, —C(O)—, —C(S)—, —C(S)S—, —SC(S)—, —CH(OH)—, —P(O)(OR′)O—, —S(O)₂—, an aryl group, and a heteroaryl group.

[0789] As used herein, an “aryl group” is a carbocyclic group including one or more aromatic rings. Examples of aryl groups include phenyl and naphthyl groups.

[0790] As used herein, a “heteroaryl group” is a heterocyclic group including one or more aromatic rings. Examples of heteroaryl groups include pyrrolyl, furyl, thiophenyl, imidazolyl, oxazolyl, and thiazolyl. Both aryl and heteroaryl groups can be optionally substituted. For example, M and M′ can be selected from the non-limiting group consisting of optionally substituted phenyl, oxazole, and thiazole. In the formulas herein, M and M′ can be independently selected from the list of biodegradable groups above.

[0791] Alkyl, alkenyl, and cyclyl (e.g., carbocyclyl and heterocyclyl) groups can be optionally substituted unless otherwise specified. Optional substituents can be selected from the group consisting of, but are not limited to, a halogen atom (e.g., a chloride, bromide, fluoride, or iodide group), a carboxylic acid (e.g., —C(O)OH), an alcohol (e.g., a hydroxyl, —OH), an ester (e.g., —C(O)OR or —OC(O)R), an aldehyde (e.g., —C(O)H), a carbonyl (e.g., —C(O)R, alternatively represented by C═O), an acyl halide (e.g., —C(O)X, in which X is a halide selected from bromide, fluoride, chloride, and iodide), a carbonate (e.g., —OC(O)OR), an alkoxy (e.g., —OR), an acetal (e.g., —C(OR)₂R″″, in which each OR are alkoxy groups that can be the same or different and R″″ is an alkyl or alkenyl group), a phosphate (e.g., P(O)₄³⁻), a thiol (e.g., —SH), a sulfoxide (e.g., —S(O)R), a sulfinic acid (e.g., —S(O)OH), a sulfonic acid (e.g., —S(O)₂OH), a thial (e.g., —C(S)H), a sulfate (e.g., S(O)₄²⁻), a sulfonyl (e.g., —S(O)₂—), an amide (e.g., —C(O)NR₂, or —N(R)C(O)R), an azido (e.g., —N₃), a nitro (e.g., —NO₂), a cyano (e.g., —CN), an isocyano (e.g., —NC), an acyloxy (e.g., —OC(O)R), an amino (e.g., —NR₂, —NRH, or —NH₂), a carbamoyl (e.g., —OC(O)NR₂, —OC(O)NRH, or —OC(O)NH₂), a sulfonamide (e.g., —S(O)₂NR₂, —S(O)₂NRH, —S(O)₂NH₂, —N(R)S(O)₂R, —N(H)S(O)₂R, —N(R)S(O)₂H, or —N(H)S(O)₂H), an alkyl group, an alkenyl group, and a cyclyl (e.g., carbocyclyl or heterocyclyl) group.

[0792] In any of the preceding, R is an alkyl or alkenyl group, as defined herein. In some embodiments, the substituent groups themselves can be further substituted with, for example, one, two, three, four, five, or six substituents as defined herein. For example, a C₁₋₆ alkyl group can be further substituted with one, two, three, four, five, or six substituents as described herein.

[0793] The compounds of any one of formulae (I), (IA), (II), (IIa), (IIb), (IIc), (IId), and (IIe) include one or more of the following features when applicable.

[0794] In some embodiments, R₄ is selected from the group consisting of a C₃₋₆ carbocycle, —(CH₂)ₙQ, —(CH₂)ₙCHQR, —CHQR, and —CQ(R)₂, where Q is selected from a C₃₋₆ carbocycle, 5- to 14-membered aromatic or non-aromatic heterocycle having one or more heteroatoms selected from N, O, S, and P, —OR, —O(CH₂)ₙN(R)₂, —C(O)OR, —OC(O)R, —CX₃, —CX₂H, —CXH₂, —CN, —N(R)₂, —C(O)N(R)₂, —N(R)C(O)R, —N(R)S(O)₂R, —N(R)C(O)N(R)₂, —N(R)C(S)N(R)₂, and —C(R)N(R)₂C(O)OR, and each n is independently selected from 1, 2, 3, 4, and 5.

[0795] In another embodiment, R₄ is selected from the group consisting of a C₃₋₆ carbocycle, —(CH₂)ₙQ, —(CH₂)ₙCHQR, —CHQR, and —CQ(R)₂, where Q is selected from a C₃₋₆ carbocycle, a 5- to 14-membered heteroaryl having one or more heteroatoms selected from N, O, and S, —OR, —O(CH₂)ₙN(R)₂, —C(O)OR, —OC(O)R, —CX₃, —CX₂H, —CXH₂, —CN, —C(O)N(R)₂, —N(R)C(O)R, —N(R)S(O)₂R, —N(R)C(O)N(R)₂, —N(R)C(S)N(R)₂, —C(R)N(R)₂C(O)OR, and a 5- to 14-membered heterocycloalkyl having one or more heteroatoms selected from N, O, and S which is substituted with one or more substituents selected from oxo (═O), OH, amino, and C₁₋₃ alkyl, and each n is independently selected from 1, 2, 3, 4, and 5.

[0796] In another embodiment, R₄ is selected from the group consisting of a C₃₋₆ carbocycle, —(CH₂)ₙQ, —(CH₂)ₙCHQR, —CHQR, and —CQ(R)₂, where Q is selected from a C₃₋₆ carbocycle, a 5- to 14-membered heterocycle having one or more heteroatoms selected from N, O, and S, —OR, —O(CH₂)ₙN(R)₂, —C(O)OR, —OC(O)R, —CX₃, —CX₂H, —CXH₂, —CN, —C(O)N(R)₂, —N(R)C(O)R, —N(R)S(O)₂R, —N(R)C(O)N(R)₂, —N(R)C(S)N(R)₂, —C(R)N(R)₂C(O)OR, and each n is independently selected from 1, 2, 3, 4, and 5; and when Q is a 5- to 14-membered heterocycle and (i) R₄ is —(CH₂)ₙQ in which n is 1 or 2, or (ii) R₄ is —(CH₂)ₙCHQR in which n is 1, or (iii) R₄ is —CHQR, and —CQ(R)₂, then Q is either a 5- to 14-membered heteroaryl or 8- to 14-membered heterocycloalkyl.

[0797] In another embodiment, R₄ is selected from the group consisting of a C₃₋₆ carbocycle, —(CH₂)ₙQ, —(CH₂)ₙCHQR, —CHQR, and —CQ(R)₂, where Q is selected from a C₃₋₆ carbocycle, a 5- to 14-membered heteroaryl having one or more heteroatoms selected from N, O, and S, —OR, —O(CH₂)ₙN(R)₂, —C(O)OR, —OC(O)R, —CX₃, —CX₂H, —CXH₂, —CN, —C(O)N(R)₂, —N(R)C(O)R, —N(R)S(O)₂R, —N(R)C(O)N(R)₂, —N(R)C(S)N(R)₂, —C(R)N(R)₂C(O)OR, and each n is independently selected from 1, 2, 3, 4, and 5.

[0798] In another embodiment, R₄ is unsubstituted C₁₋₄ alkyl, e.g., unsubstituted methyl.

[0799] In certain embodiments, the disclosure provides a compound having the Formula (I), wherein R₄ is —(CH₂)ₙQ or —(CH₂)ₙCHQR, where Q is —N(R)₂, and n is selected from 3, 4, and 5.

[0800] In certain embodiments, the disclosure provides a compound having the Formula (I), wherein R₄ is selected from the group consisting of —(CH₂)ₙQ, —(CH₂)ₙCHQR, —CHQR, and —CQ(R)₂, where Q is —N(R)₂, and n is selected from 1, 2, 3, 4, and 5.

[0801] In certain embodiments, the disclosure provides a compound having the Formula (I), wherein R₂ and R₃ are independently selected from the group consisting of C₂₋₁₄ alkyl, C₂₋₁₄ alkenyl, —R*YR″, —YR″, and —R*OR″, or R₂ and R₃, together with the atom to which they are attached, form a heterocycle or carbocycle, and R₄ is —(CH₂)ₙQ or —(CH₂)ₙCHQR, where Q is —N(R)₂, and n is selected from 3, 4, and 5.

[0802] In certain embodiments, R₂ and R₃ are independently selected from the group consisting of C₂₋₁₄ alkyl, C₂₋₁₄ alkenyl, —R*YR″, —YR″, and —R*OR″, or R₂ and R₃, together with the atom to which they are attached, form a heterocycle or carbocycle.

[0803] In some embodiments, R₁ is selected from the group consisting of C₅₋₂₀ alkyl and C₅₋₂₀ alkenyl.

[0804] In other embodiments, R₁ is selected from the group consisting of —R*YR″, —YR″, and —R″M′R′.

[0805] In certain embodiments, R₁ is selected from —R*YR″ and —YR″. In some embodiments, Y is a cyclopropyl group. In some embodiments, R* is C₈ alkyl or C₈ alkenyl. In certain embodiments, R″ is C₃₋₁₂ alkyl. For example, R″ can be C₃ alkyl. For example, R″ can be C₄₋₈ alkyl (e.g., C₄, C₅, C₆, C₇, or C₈ alkyl).

[0806] In some embodiments, R₁ is C₅₋₂₀ alkyl. In some embodiments, R₁ is C₆ alkyl. In some embodiments, R₁ is C₈ alkyl. In other embodiments, R₁ is C₉ alkyl. In certain embodiments, R₁ is C₁₄ alkyl. In other embodiments, R₁ is Cis alkyl.

[0807] In some embodiments, R₁ is C₅₋₂₀ alkenyl. In certain embodiments, R₁ is C₁₈ alkenyl. In some embodiments, R₁ is linoleyl.

[0808] In certain embodiments, R₁ is branched (e.g., decan-2-yl, undecan-3-yl, dodecan-4-yl, tridecan-5-yl, tetradecan-6-yl, 2-methylundecan-3-yl, 2-methyldecan-2-yl, 3-methylundecan-3-yl, 4-methyldodecan-4-yl, or heptadeca-9-yl). In certain embodiments, R₁ is

[chemical structure]

[0809] In certain embodiments, R₁ is unsubstituted C₅₋₂₀ alkyl or C₅₋₂₀ alkenyl. In certain embodiments, R′ is substituted C₅₋₂₀ alkyl or C₅₋₂₀ alkenyl (e.g., substituted with a C₃₋₆ carbocycle such as 1-cyclopropylnonyl).

[0810] In other embodiments, R₁ is —R″M′R′.

[0811] In some embodiments, R′ is selected from —R*YR″ and —YR″. In some embodiments, Y is C₃₋₈ cycloalkyl. In some embodiments, Y is C₆₋₁₀ aryl. In some embodiments, Y is a cyclopropyl group. In some embodiments, Y is a cyclohexyl group. In certain embodiments, R* is C₁ alkyl.

[0812] In some embodiments, R″ is selected from the group consisting of C₃₋₁₂ alkyl and C₃₋₁₂ alkenyl. In some embodiments, R″ adjacent to Y is C₁ alkyl. In some embodiments, R″ adjacent to Y is C₄₋₉ alkyl (e.g., C₄, C₅, C₆, C₇ or C₈ or C₉ alkyl).

[0813] In some embodiments, R′ is selected from C₄ alkyl and C₄ alkenyl. In certain embodiments, R′ is selected from C₈ alkyl and C₈ alkenyl. In some embodiments, R′ is selected from C₆ alkyl and C₆ alkenyl. In some embodiments, R′ is selected from C₇ alkyl and C₇ alkenyl. In some embodiments, R′ is selected from C₉ alkyl and C₉ alkenyl.

[0814] In other embodiments, R′ is selected from C₁₁ alkyl and C₁₁ alkenyl. In other embodiments, R′ is selected from C₁₂ alkyl, C₁₂ alkenyl, C₁₃ alkyl, C₁₃ alkenyl, C₁₄ alkyl, C₁₄ alkenyl, C₁₅ alkyl, C₁₅ alkenyl, C₁₆ alkyl, C₁₆ alkenyl, C₁₇ alkyl, C₁₇ alkenyl, C₁₈ alkyl, and C₁₈ alkenyl. In certain embodiments, R′ is branched (e.g., decan-2-yl, undecan-3-yl, dodecan-4-yl, tridecan-5-yl, tetradecan-6-yl, 2-methylundecan-3-yl, 2-methyldecan-2-yl, 3-methylundecan-3-yl, 4-methyldodecan-4-yl or heptadeca-9-yl). In certain embodiments, R′ is

[chemical structure]

[0815] In certain embodiments, R′ is unsubstituted C₁₋₁₈ alkyl. In certain embodiments, R′ is substituted C₁₋₁₈ alkyl (e.g., C₁₋₁₅ alkyl substituted with a C₃₋₆ carbocycle such as 1-cyclopropylnonyl).

[0816] In some embodiments, R″ is selected from the group consisting of C₃₋₁₄ alkyl and C₃₋₁₄ alkenyl. In some embodiments, R″ is C₃ alkyl, C₄ alkyl, C₅ alkyl, C₆ alkyl, C₇ alkyl, or C₈ alkyl. In some embodiments, R″ is C₉ alkyl, C₁₀ alkyl, C₁₁ alkyl, C₁₂ alkyl, C₁₃ alkyl, or C₁₄ alkyl.

[0817] In some embodiments, M′ is —C(O)O—. In some embodiments, M′ is —OC(O)—.

[0818] In other embodiments, M′ is an aryl group or heteroaryl group. For example, M′ can be selected from the group consisting of phenyl, oxazole, and thiazole.

[0819] In some embodiments, M is —C(O)O— In some embodiments, M is —OC(O)—. In some embodiments, M is —C(O)N(R′)—. In some embodiments, M is —P(O)(OR′)O—.

[0820] In other embodiments, M is an aryl group or heteroaryl group. For example, M can be selected from the group consisting of phenyl, oxazole, and thiazole.

[0821] In some embodiments, M is the same as M′. In other embodiments, M is different from M′.

[0822] In some embodiments, each R₅ is H. In certain such embodiments, each R₆ is also H.

[0823] In some embodiments, R₇ is H. In other embodiments, R₇ is C₁₋₃ alkyl (e.g., methyl, ethyl, propyl, or i-propyl).

[0824] In some embodiments, R₂ and R₃ are independently C₅₋₁₄ alkyl or C₅₋₁₄ alkenyl.

[0825] In some embodiments, R₂ and R₃ are the same. In some embodiments, R₂ and R₃ are C₈ alkyl. In certain embodiments, R₂ and R₃ are C₂ alkyl. In other embodiments, R₂ and R₃ are C₃ alkyl. In some embodiments, R₂ and R₃ are C₄ alkyl. In certain embodiments, R₂ and R₃ are C₅ alkyl. In other embodiments, R₂ and R₃ are C₆ alkyl. In some embodiments, R₂ and R₃ are C₇ alkyl.

[0826] In other embodiments, R₂ and R₃ are different. In certain embodiments, R₂ is C₈ alkyl. In some embodiments, R₃ is C₁₋₇ (e.g., C₁, C₂, C₃, C₄, C₅, C₆, or C₇ alkyl) or C₉ alkyl.

[0827] In some embodiments, R₇ and R₃ are H.

[0828] In certain embodiments, R₂ is H.

[0829] In some embodiments, m is 5, 7, or 9.

[0830] In some embodiments, R₄ is selected from —(CH₂)ₙQ and —(CH₂)ₙCHQR.

[0831] In some embodiments, Q is selected from the group consisting of —OR, —OH, —O(CH₂)ₙN(R)₂, —OC(O)R, —CX₃, —CN, —N(R)C(O)R, —N(H)C(O)R, —N(R)S(O)₂R, —N(H)S(O)₂R, —N(R)C(O)N(R)₂, —N(H)C(O)N(R)₂, —N(H)C(O)N(H)(R), —N(R)C(S)N(R)₂, —N(H)C(S)N(R)₂, —N(H)C(S)N(H)(R), —C(R)N(R)₂C(O)OR, a carbocycle, and a heterocycle.

[0832] In certain embodiments, Q is —OH.

[0833] In certain embodiments, Q is a substituted or unsubstituted 5- to 10-membered heteroaryl, e.g., Q is an imidazole, a pyrimidine, a purine, 2-amino-1,9-dihydro-6H-purin-6-one-9-yl (or guanin-9-yl), adenin-9-yl, cytosin-1-yl, or uracil-1-yl. In certain embodiments, Q is a substituted 5- to 14-membered heterocycloalkyl, e.g., substituted with one or more substituents selected from oxo (═O), OH, amino, and C₁₋₃ alkyl. For example, Q is 4-methylpiperazinyl, 4-(4-methoxybenzyl)piperazinyl, or isoindolin-2-yl-1,3-dione.

[0834] In certain embodiments, Q is an unsubstituted or substituted C₆₋₁₀ aryl (such as phenyl) or C₃₋₆ cycloalkyl.

[0835] In some embodiments, n is 1. In other embodiments, n is 2. In further embodiments, n is 3. In certain other embodiments, n is 4. For example, R₄ can be —(CH₂)₂OH. For example, R₄ can be —(CH₂)₃OH. For example, R₄ can be —(CH₂)₄OH. For example, R₄ can be benzyl. For example, R₄ can be 4-methoxybenzyl.

[0836] In some embodiments, R₄ is a C₃₋₆ carbocycle. In some embodiments, R₄ is a C₃₋₆ cycloalkyl. For example, R₄ can be cyclohexyl optionally substituted with e.g., OH, halo, C₁₋₆ alkyl, etc. For example, R₄ can be 2-hydroxycyclohexyl.

[0837] In some embodiments, R is H.

[0838] In some embodiments, R is unsubstituted C₁₋₃ alkyl or unsubstituted C₂₋₃ alkenyl. For example, R₄ can be —CH₂CH(OH)CH₃ or —CH₂CH(OH)CH₂CH₃.

[0839] In some embodiments, R is substituted C₁₋₃ alkyl, e.g., CH₂OH. For example, R₄ can be —CH₂CH(OH)CH₂OH.

[0840] In some embodiments, R₂ and R₃, together with the atom to which they are attached, form a heterocycle or carbocycle. In some embodiments, R₂ and R₃, together with the atom to which they are attached, form a 5- to 14-membered aromatic or non-aromatic heterocycle having one or more heteroatoms selected from N, O, S, and P. In some embodiments, R₂ and R₃, together with the atom to which they are attached, form an optionally substituted C₃₋₂₀ carbocycle (e.g., C₃₋₁₈ carbocycle, C₃₋₁₅ carbocycle, C₃₋₁₂ carbocycle, or C₃₋₁₀ carbocycle), either aromatic or non-aromatic. In some embodiments, R₂ and R₃, together with the atom to which they are attached, form a C₃₋₆ carbocycle. In other embodiments, R₂ and R₃, together with the atom to which they are attached, form a C₆ carbocycle, such as a cyclohexyl or phenyl group. In certain embodiments, the heterocycle or C₃₋₆ carbocycle is substituted with one or more alkyl groups (e.g., at the same ring atom or at adjacent or non-adjacent ring atoms). For example, R₂ and R₃, together with the atom to which they are attached, can form a cyclohexyl or phenyl group bearing one or more C₅ alkyl substitutions. In certain embodiments, the heterocycle or C₃₋₆ carbocycle formed by R₂ and R₃, is substituted with a carbocycle groups. For example, R₂ and R₃, together with the atom to which they are attached, can form a cyclohexyl or phenyl group that is substituted with cyclohexyl. In some embodiments, R₂ and R₃, together with the atom to which they are attached, form a C₇₋₁₅ carbocycle, such as a cycloheptyl, cyclopentadecanyl, or naphthyl group.

[0841] In some embodiments, R₄ is selected from —(CH₂)ₙQ and —(CH₂)ₙCHQR. In some embodiments, Q is selected from the group consisting of —OR, —OH, —O(CH₂)ₙN(R)₂, —OC(O)R, —CX₃, —CN, —N(R)C(O)R, —N(H)C(O)R, —N(R)S(O)₂R, —N(H)S(O)₂R, —N(R)C(O)N(R)₂, —N(H)C(O)N(R)₂, —N(H)C(O)N(H)(R), —N(R)C(S)N(R)₂, —N(H)C(S)N(R)₂, —N(H)C(S)N(H)(R), and a heterocycle. In other embodiments, Q is selected from the group consisting of an imidazole, a pyrimidine, and a purine.

[0842] In some embodiments, R₂ and R₃, together with the atom to which they are attached, form a heterocycle or carbocycle. In some embodiments, R₂ and R₃, together with the atom to which they are attached, form a C₃₋₆ carbocycle, such as a phenyl group. In certain embodiments, the heterocycle or C₃₋₆ carbocycle is substituted with one or more alkyl groups (e.g., at the same ring atom or at adjacent or non-adjacent ring atoms). For example, R₂ and R₃, together with the atom to which they are attached, can form a phenyl group bearing one or more C₅ alkyl substitutions.

[0843] In some embodiments, the pharmaceutical compositions of the present disclosure, the compound of formula (I) is selected from the group consisting of:

[chemical structure]

[chemical structure]

[chemical structure]

[chemical structure]

[chemical structure]

[chemical structure]

[chemical structure]

[chemical structure]

[chemical structure]

[chemical structure]

[chemical structure]

[chemical structure]

[chemical structure]

[chemical structure]

[chemical structure]

[chemical structure]

[chemical structure]

[chemical structure]

[chemical structure]

[chemical structure]

[chemical structure]

[chemical structure]

[chemical structure]

[chemical structure]

[0844] The central amine moiety of a lipid according to formula (I) is typically protonated (i.e., positively charged) at a pH below the pKa of the amino moiety and is substantially not charged at a pH above the pKa. Such lipids can be referred to ionizable amino lipids.

[0845] In one specific embodiment, the compound of formula (I) is Compound 18.

[0846] In some embodiments, the amount of the compound of formula (I) ranges from about 1 mol % to 99 mol % in the lipid composition.

[0847] In one embodiment, the amount of the compound of formula (I) is at least about 1, 2, 3, 4, 5, 6, 7, 8, 9, 10, 11, 12, 13, 14, 15, 16, 17, 18, 19, 20, 21, 22, 23, 24, 25, 26, 27, 28, 29, 30, 31, 32, 33, 34, 35, 36, 37, 38, 39, 40, 41, 42, 43, 44, 45, 46, 47, 48, 49, 50, 51, 52, 53, 54, 55, 56, 57, 58, 59, 60, 61, 62, 63, 64, 65, 66, 67, 68, 69, 70, 71, 72, 73, 74, 75, 76, 77, 78, 79, 80, 81, 82, 83, 84, 85, 86, 87, 88, 89, 90, 91, 92, 93, 94, 95, 96, 97, 98, or 99 mol % in the lipid composition.

[0848] In one embodiment, the amount of the compound of formula (I) ranges from about 30 mol % to about 70 mol %, from about 35 mol % to about 65 mol %, from about 40 mol % to about 60 mol %, and from about 45 mol % to about 55 mol % in the lipid composition.

[0849] In one specific embodiment, the amount of the compound of formula (I) is about 50 mol % in the lipid composition.

[0850] In addition to the compound of formula (I), the lipid composition of the pharmaceutical compositions disclosed herein can comprise additional components such as phospholipids, structural lipids, quaternary amine compounds, PEG-lipids, and any combination thereof.

[0851] b. Additional Components in the Lipid Composition

[0852] (i) Phospholipids

[0853] The lipid composition of the pharmaceutical composition disclosed herein can comprise one or more phospholipids, for example, one or more saturated or (poly)unsaturated phospholipids or a combination thereof. In general, phospholipids comprise a phospholipid moiety and one or more fatty acid moieties. For example, a phospholipid can be a lipid according to formula (III):

[chemical structure]

in which Rₚ represents a phospholipid moiety and R₁ and R₂ represent fatty acid moieties with or without unsaturation that can be the same or different.

[0854] A phospholipid moiety can be selected, for example, from the non-limiting group consisting of phosphatidyl choline, phosphatidyl ethanolamine, phosphatidyl glycerol, phosphatidyl serine, phosphatidic acid, 2-lysophosphatidyl choline, and a sphingomyelin.

[0855] A fatty acid moiety can be selected, for example, from the non-limiting group consisting of lauric acid, myristic acid, myristoleic acid, palmitic acid, palmitoleic acid, stearic acid, oleic acid, linoleic acid, alpha-linolenic acid, erucic acid, phytanoic acid, arachidic acid, arachidonic acid, eicosapentaenoic acid, behenic acid, docosapentaenoic acid, and docosahexaenoic acid.

[0856] Particular phospholipids can facilitate fusion to a membrane. For example, a cationic phospholipid can interact with one or more negatively charged phospholipids of a membrane (e.g., a cellular or intracellular membrane). Fusion of a phospholipid to a membrane can allow one or more elements (e.g., a therapeutic agent) of a lipid-containing composition (e.g., LNPs) to pass through the membrane permitting, e.g., delivery of the one or more elements to a target tissue (e.g., tumoral tissue).

[0857] Non-natural phospholipid species including natural species with modifications and substitutions including branching, oxidation, cyclization, and alkynes are also contemplated. For example, a phospholipid can be functionalized with or cross-linked to one or more alkynes (e.g., an alkenyl group in which one or more double bonds is replaced with a triple bond). Under appropriate reaction conditions, an alkyne group can undergo a copper-catalyzed cycloaddition upon exposure to an azide. Such reactions can be useful in functionalizing a lipid bilayer of a nanoparticle composition to facilitate membrane permeation or cellular recognition or in conjugating a nanoparticle composition to a useful component such as a targeting or imaging moiety (e.g., a dye).

[0858] Phospholipids include, but are not limited to, glycerophospholipids such as phosphatidylcholines, phosphatidylethanolamines, phosphatidylserines, phosphatidylinositols, phosphatidy glycerols, and phosphatidic acids. Phospholipids also include phosphosphingolipid, such as sphingomyelin. In some embodiments, a pharmaceutical composition for intratumoral delivery disclosed herein can comprise more than one phospholipid. When more than one phospholipid is used, such phospholipids can belong to the same phospholipid class (e.g., MSPC and DSPC) or different classes (e.g., MSPC and MSPE).

[0859] Phospholipids can be of a symmetric or an asymmetric type. As used herein, the term “symmetric phospholipid” includes glycerophospholipids having matching fatty acid moieties and sphingolipids in which the variable fatty acid moiety and the hydrocarbon chain of the sphingosine backbone include a comparable number of carbon atoms. As used herein, the term “asymmetric phospholipid” includes lysolipids, glycerophospholipids having different fatty acid moieties (e.g., fatty acid moieties with different numbers of carbon atoms and/or unsaturations (e.g., double bonds)), and sphingolipids in which the variable fatty acid moiety and the hydrocarbon chain of the sphingosine backbone include a dissimilar number of carbon atoms (e.g., the variable fatty acid moiety include at least two more carbon atoms than the hydrocarbon chain or at least two fewer carbon atoms than the hydrocarbon chain).

[0860] In some embodiments, the lipid composition of a pharmaceutical composition disclosed herein comprises at least one symmetric phospholipid. Symmetric phospholipids can be selected from the non-limiting group consisting of
[0861] 1,2-dipropionyl-sn-glycero-3-phosphocholine (03:0 PC),
[0862] 1,2-dibutyryl-sn-glycero-3-phosphocholine (04:0 PC),
[0863] 1,2-dipentanoyl-sn-glycero-3-phosphocholine (05:0 PC),
[0864] 1,2-dihexanoyl-sn-glycero-3-phosphocholine (06:0 PC),
[0865] 1,2-diheptanoyl-sn-glycero-3-phosphocholine (07:0 PC),
[0866] 1,2-dioctanoyl-sn-glycero-3-phosphocholine (08:0 PC),
[0867] 1,2-dinonanoyl-sn-glycero-3-phosphocholine (09:0 PC),
[0868] 1,2-didecanoyl-sn-glycero-3-phosphocholine (10:0 PC),
[0869] 1,2-diundecanoyl-sn-glycero-3-phosphocholine (11:0 PC, DUPC),
[0870] 1,2-dilauroyl-sn-glycero-3-phosphocholine (12:0 PC),
[0871] 1,2-ditridecanoyl-sn-glycero-3-phosphocholine (13:0 PC),
[0872] 1,2-dimyristoyl-sn-glycero-3-phosphocholine (14:0 PC, DMPC),
[0873] 1,2-dipentadecanoyl-sn-glycero-3-phosphocholine (15:0 PC),
[0874] 1,2-dipalmitoyl-sn-glycero-3-phosphocholine (16:0 PC, DPPC),
[0875] 1,2-diphytanoyl-sn-glycero-3-phosphocholine (4ME 16:0 PC),
[0876] 1,2-diheptadecanoyl-sn-glycero-3-phosphocholine (17:0 PC),
[0877] 1,2-distearoyl-sn-glycero-3-phosphocholine (18:0 PC, DSPC),
[0878] 1,2-dinonadecanoyl-sn-glycero-3-phosphocholine (19:0 PC),
[0879] 1,2-diarachidoyl-sn-glycero-3-phosphocholine (20:0 PC),
[0880] 1,2-dihenarachidoyl-sn-glycero-3-phosphocholine (21:0 PC),
[0881] 1,2-dibehenoyl-sn-glycero-3-phosphocholine (22:0 PC),
[0882] 1,2-ditricosanoyl-sn-glycero-3-phosphocholine (23:0 PC),
[0883] 1,2-dilignoceroyl-sn-glycero-3-phosphocholine (24:0 PC),
[0884] 1,2-dimyristoleoyl-sn-glycero-3-phosphocholine (14:1 (Δ9-Cis) PC),
[0885] 1,2-dimyristelaidoyl-sn-glycero-3-phosphocholine (14:1 (Δ9-Trans) PC),
[0886] 1,2-dipalmitoleoyl-sn-glycero-3-phosphocholine (16:1 (Δ9-Cis) PC),
[0887] 1,2-dipalmitelaidoyl-sn-glycero-3-phosphocholine (16:1 (Δ9-Trans) PC),
[0888] 1,2-dipetroselenoyl-sn-glycero-3-phosphocholine (18:1 (Δ6-Cis) PC),
[0889] 1,2-dioleoyl-sn-glycero-3-phosphocholine (18:1 (Δ9-Cis) PC, DOPC),
[0890] 1,2-dielaidoyl-sn-glycero-3-phosphocholine (18:1 (Δ9-Trans) PC),
[0891] 1,2-dilinoleoyl-sn-glycero-3-phosphocholine (18:2 (Cis) PC, DLPC),
[0892] 1,2-dilinolenoyl-sn-glycero-3-phosphocholine (18:3 (Cis) PC, DLnPC),
[0893] 1,2-dieicosenoyl-sn-glycero-3-phosphocholine (20:1 (Cis) PC),
[0894] 1,2-diarachidonoyl-sn-glycero-3-phosphocholine (20:4 (Cis) PC, DAPC),
[0895] 1,2-dierucoyl-sn-glycero-3-phosphocholine (22:1 (Cis) PC),
[0896] 1,2-didocosahexaenoyl-sn-glycero-3-phosphocholine (22:6 (Cis) PC, DHAPC),
[0897] 1,2-dinervonoyl-sn-glycero-3-phosphocholine (24:1 (Cis) PC),
[0898] 1,2-dihexanoyl-sn-glycero-3-phosphoethanolamine (06:0 PE),
[0899] 1,2-dioctanoyl-sn-glycero-3-phosphoethanolamine (08:0 PE),
[0900] 1,2-didecanoyl-sn-glycero-3-phosphoethanolamine (10:0 PE),
[0901] 1,2-dilauroyl-sn-glycero-3-phosphoethanolamine (12:0 PE),
[0902] 1,2-dimyristoyl-sn-glycero-3-phosphoethanolamine (14:0 PE),
[0903] 1,2-dipentadecanoyl-sn-glycero-3-phosphoethanolamine (15:0 PE),
[0904] 1,2-dipalmitoyl-sn-glycero-3-phosphoethanolamine (16:0 PE),
[0905] 1,2-diphytanoyl-sn-glycero-3-phosphoethanolamine (4ME 16:0 PE),
[0906] 1,2-diheptadecanoyl-sn-glycero-3-phosphoethanolamine (17:0 PE),
[0907] 1,2-di stearoyl-sn-glycero-3-phosphoethanolamine (18:0 PE, DSPE),
[0908] 1,2-dipalmitoleoyl-sn-glycero-3-phosphoethanolamine (16:1 PE),
[0909] 1,2-dioleoyl-sn-glycero-3-phosphoethanolamine (18:1 (Δ9-Cis) PE, DOPE),
[0910] 1,2-dielaidoyl-sn-glycero-3-phosphoethanolamine (18:1 (Δ9-Trans) PE),
[0911] 1,2-dilinoleoyl-sn-glycero-3-phosphoethanolamine (18:2 PE, DLPE),
[0912] 1,2-dilinolenoyl-sn-glycero-3-phosphoethanolamine (18:3 PE, DLnPE),
[0913] 1,2-diarachidonoyl-sn-glycero-3-phosphoethanolamine (20:4 PE, DAPE),
[0914] 1,2-didocosahexaenoyl-sn-glycero-3-phosphoethanolamine (22:6 PE, DHAPE),
[0915] 1,2-di-O-octadecenyl-sn-glycero-3-phosphocholine (18:0 Diether PC),
[0916] 1,2-dioleoyl-sn-glycero-3-phospho-rac-(1-glycerol) sodium salt (DOPG), and
[0917] any combination thereof.

[0918] In some embodiments, the lipid composition of a pharmaceutical composition disclosed herein comprises at least one symmetric phospholipid selected from the non-limiting group consisting of DLPC, DMPC, DOPC, DPPC, DSPC, DUPC, 18:0 Diether PC, DLnPC, DAPC, DHAPC, DOPE, 4ME 16:0 PE, DSPE, DLPE, DLnPE, DAPE, DHAPE, DOPG, and any combination thereof.

[0919] In some embodiments, the lipid composition of a pharmaceutical composition disclosed herein comprises at least one asymmetric phospholipid. Asymmetric phospholipids can be selected from the non-limiting group consisting of
[0920] 1-myristoyl-2-palmitoyl-sn-glycero-3-phosphocholine (14:0-16:0 PC, MPPC),
[0921] 1-myristoyl-2-stearoyl-sn-glycero-3-phosphocholine (14:0-18:0 PC, MSPC),
[0922] 1-palmitoyl-2-acetyl-sn-glycero-3-phosphocholine (16:0-02:0 PC),
[0923] 1-palmitoyl-2-myristoyl-sn-glycero-3-phosphocholine (16:0-14:0 PC, PMPC),
[0924] 1-palmitoyl-2-stearoyl-sn-glycero-3-phosphocholine (16:0-18:0 PC, PSPC),
[0925] 1-palmitoyl-2-oleoyl-sn-glycero-3-phosphocholine (16:0-18:1 PC, POPC),
[0926] 1-palmitoyl-2-linoleoyl-sn-glycero-3-phosphocholine (16:0-18:2 PC, PLPC),
[0927] 1-palmitoyl-2-arachidonoyl-sn-glycero-3-phosphocholine (16:0-20:4 PC),
[0928] 1-palmitoyl-2-docosahexaenoyl-sn-glycero-3-phosphocholine (14:0-22:6 PC),
[0929] 1-stearoyl-2-myristoyl-sn-glycero-3-phosphocholine (18:0-14:0 PC, SMPC),
[0930] 1-stearoyl-2-palmitoyl-sn-glycero-3-phosphocholine (18:0-16:0 PC, SPPC),
[0931] 1-stearoyl-2-oleoyl-sn-glycero-3-phosphocholine (18:0-18:1 PC, SOPC),
[0932] 1-stearoyl-2-linoleoyl-sn-glycero-3-phosphocholine (18:0-18:2 PC),
[0933] 1-stearoyl-2-arachidonoyl-sn-glycero-3-phosphocholine (18:0-20:4 PC),
[0934] 1-stearoyl-2-docosahexaenoyl-sn-glycero-3-phosphocholine (18:0-22:6 PC),
[0935] 1-oleoyl-2-myristoyl-sn-glycero-3-phosphocholine (18:1-14:0 PC, OMPC),
[0936] 1-oleoyl-2-palmitoyl-sn-glycero-3-phosphocholine (18:1-16:0 PC, OPPC),
[0937] 1-oleoyl-2-stearoyl-sn-glycero-3-phosphocholine (18:1-18:0 PC, OSPC),
[0938] 1-palmitoyl-2-oleoyl-sn-glycero-3-phosphoethanolamine (16:0-18:1 PE, POPE),
[0939] 1-palmitoyl-2-linoleoyl-sn-glycero-3-phosphoethanolamine (16:0-18:2 PE),
[0940] 1-palmitoyl-2-arachidonoyl-sn-glycero-3-phosphoethanolamine (16:0-20:4 PE),
[0941] 1-palmitoyl-2-docosahexaenoyl-sn-glycero-3-phosphoethanolamine (16:0-22:6 PE),
[0942] 1-stearoyl-2-oleoyl-sn-glycero-3-phosphoethanolamine (18:0-18:1 PE),
[0943] 1-stearoyl-2-linoleoyl-sn-glycero-3-phosphoethanolamine (18:0-18:2 PE),
[0944] 1-stearoyl-2-arachidonoyl-sn-glycero-3-phosphoethanolamine (18:0-20:4 PE),
[0945] 1-stearoyl-2-docosahexaenoyl-sn-glycero-3-phosphoethanolamine (18:0-22:6 PE),
[0946] 1-oleoyl-2-cholesterylhemisuccinoyl-sn-glycero-3-phosphocholine (OChemsPC), and
[0947] any combination thereof.

[0948] Asymmetric lipids useful in the lipid composition can also be lysolipids. Lysolipids can be selected from the non-limiting group consisting of
[0949] 1-hexanoyl-2-hydroxy-sn-glycero-3-phosphocholine (06:0 Lyso PC),
[0950] 1-heptanoyl-2-hydroxy-sn-glycero-3-phosphocholine (07:0 Lyso PC),
[0951] 1-octanoyl-2-hydroxy-sn-glycero-3-phosphocholine (08:0 Lyso PC),
[0952] 1-nonanoyl-2-hydroxy-sn-glycero-3-phosphocholine (09:0 Lyso PC),
[0953] 1-decanoyl-2-hydroxy-sn-glycero-3-phosphocholine (10:0 Lyso PC),
[0954] 1-undecanoyl-2-hydroxy-sn-glycero-3-phosphocholine (11:0 Lyso PC),
[0955] 1-lauroyl-2-hydroxy-sn-glycero-3-phosphocholine (12:0 Lyso PC),
[0956] 1-tridecanoyl-2-hydroxy-sn-glycero-3-phosphocholine (13:0 Lyso PC),
[0957] 1-myristoyl-2-hydroxy-sn-glycero-3-phosphocholine (14:0 Lyso PC),
[0958] 1-pentadecanoyl-2-hydroxy-sn-glycero-3-phosphocholine (15:0 Lyso PC),
[0959] 1-palmitoyl-2-hydroxy-sn-glycero-3-phosphocholine (16:0 Lyso PC),
[0960] 1-heptadecanoyl-2-hydroxy-sn-glycero-3-phosphocholine (17:0 Lyso PC),
[0961] 1-stearoyl-2-hydroxy-sn-glycero-3-phosphocholine (18:0 Lyso PC),
[0962] 1-oleoyl-2-hydroxy-sn-glycero-3-phosphocholine (18:1 Lyso PC),
[0963] 1-nonadecanoyl-2-hydroxy-sn-glycero-3-phosphocholine (19:0 Lyso PC),
[0964] 1-arachidoyl-2-hydroxy-sn-glycero-3-phosphocholine (20:0 Lyso PC),
[0965] 1-behenoyl-2-hydroxy-sn-glycero-3-phosphocholine (22:0 Lyso PC),
[0966] 1-lignoceroyl-2-hydroxy-sn-glycero-3-phosphocholine (24:0 Lyso PC),
[0967] 1-hexacosanoyl-2-hydroxy-sn-glycero-3-phosphocholine (26:0 Lyso PC),
[0968] 1-myristoyl-2-hydroxy-sn-glycero-3-phosphoethanolamine (14:0 Lyso PE),
[0969] 1-palmitoyl-2-hydroxy-sn-glycero-3-phosphoethanolamine (16:0 Lyso PE),
[0970] 1-stearoyl-2-hydroxy-sn-glycero-3-phosphoethanolamine (18:0 Lyso PE),
[0971] 1-oleoyl-2-hydroxy-sn-glycero-3-phosphoethanolamine (18:1 Lyso PE),
[0972] 1-hexadecyl-sn-glycero-3-phosphocholine (C16 Lyso PC), and
[0973] any combination thereof.

[0974] In some embodiment, the lipid composition of a pharmaceutical composition disclosed herein comprises at least one asymmetric phospholipid selected from the group consisting of MPPC, MSPC, PMPC, PSPC, SMPC, SPPC, and any combination thereof. In some embodiments, the asymmetric phospholipid is 1-myristoyl-2-stearoyl-sn-glycero-3-phosphocholine (MSPC).

[0975] In some embodiments, the lipid compositions disclosed herein can contain one or more symmetric phospholipids, one or more asymmetric phospholipids, or a combination thereof. When multiple phospholipids are present, they can be present in equimolar ratios, or non-equimolar ratios.

[0976] In one embodiment, the lipid composition of a pharmaceutical composition disclosed herein comprises a total amount of phospholipid (e.g., MSPC) which ranges from about 1 mol % to about 20 mol %, from about 5 mol % to about 20 mol %, from about 10 mol % to about 20 mol %, from about 15 mol % to about 20 mol %, from about 1 mol % to about 15 mol %, from about 5 mol % to about 15 mol %, from about 10 mol % to about 15 mol %, from about 5 mol % to about 10 mol % in the lipid composition. In one embodiment, the amount of the phospholipid is from about 8 mol % to about 15 mol % in the lipid composition. In one embodiment, the amount of the phospholipid (e.g., MSPC) is about 10 mol % in the lipid composition.

[0977] In some aspects, the amount of a specific phospholipid (e.g., MSPC) is at least about 1, 2, 3, 4, 5, 6, 7, 8, 9, 10, 11, 12, 13, 14, 15, 16, 17, 18, 19 or 20 mol % in the lipid composition.

[0978] (ii) Quaternary Amine Compounds

[0979] The lipid composition of a pharmaceutical composition disclosed herein can comprise one or more quaternary amine compounds (e.g., DOTAP). The term “quaternary amine compound” is used to include those compounds having one or more quaternary amine groups (e.g., trialkylamino groups) and permanently carrying a positive charge and existing in a form of a salt. For example, the one or more quaternary amine groups can be present in a lipid or a polymer (e.g., PEG). In some embodiments, the quaternary amine compound comprises (1) a quaternary amine group and (2) at least one hydrophobic tail group comprising (i) a hydrocarbon chain, linear or branched, and saturated or unsaturated, and (ii) optionally an ether, ester, carbonyl, or ketal linkage between the quaternary amine group and the hydrocarbon chain. In some embodiments, the quaternary amine group can be a trimethylammonium group. In some embodiments, the quaternary amine compound comprises two identical hydrocarbon chains. In some embodiments, the quaternary amine compound comprises two different hydrocarbon chains.

[0980] In some embodiments, the lipid composition of a pharmaceutical composition disclosed herein comprises at least one quaternary amine compound. Quaternary amine compound can be selected from the non-limiting group consisting of
[0981] 1,2-dioleoyl-3-trimethylammonium-propane (DOTAP),
[0982] N-[1-(2,3-dioleoyloxy)propyl]-N,N,N-trimethylammonium chloride (DOTMA),
[0983] 1-[2-(oleoyloxy)ethyl]-2-oleyl-3-(2-hydroxyethyl)imidazolinium chloride (DOTIM),
[0984] 2,3-dioleyloxy-N-[2(sperminecarboxamido)ethyl]-N,N-dimethyl-1-propanaminium trifluoroacetate (DOSPA),
[0985] N,N-distearyl-N,N-dimethylammonium bromide (DDAB),
[0986] N-(1,2-dimyristyloxyprop-3-yl)-N,N-dimethyl-N-hydroxyethyl ammonium bromide (DMRIE),
[0987] N-(1,2-dioleoyloxyprop-3-yl)-N,N-dimethyl-N-hydroxyethyl ammonium bromide (DORIE),
[0988] N,N-dioleyl-N,N-dimethylammonium chloride (DODAC),
[0989] 1,2-dilauroyl-sn-glycero-3-ethylphosphocholine (DLePC),
[0990] 1,2-distearoyl-3-trimethylammonium-propane (DSTAP),
[0991] 1,2-dipalmitoyl-3-trimethylammonium-propane (DPTAP),
[0992] 1,2-dilinoleoyl-3-trimethylammonium-propane (DLTAP),
[0993] 1,2-dimyristoyl-3-trimethylammonium-propane (DMTAP)
[0994] 1,2-distearoyl-sn-glycero-3-ethylphosphocholine (DSePC)
[0995] 1,2-dipalmitoyl-sn-glycero-3-ethylphosphocholine (DPePC),
[0996] 1,2-dimyristoyl-sn-glycero-3-ethylphosphocholine (DMePC),
[0997] 1,2-dioleoyl-sn-glycero-3-ethylphosphocholine (DOePC),
[0998] 1,2-di-(9Z-tetradecenoyl)-sn-glycero-3-ethylphosphocholine (14:1 EPC),
[0999] 1-palmitoyl-2-oleoyl-sn-glycero-3-ethylphosphocholine (16:0-18:1 EPC),
[1000] and any combination thereof.

[1001] In one embodiment, the quaternary amine compound is 1,2-dioleoyl-3-trimethylammonium-propane (DOTAP).

[1002] Quaternary amine compounds are known in the art, such as those described in US 2013/0245107 A1, US 2014/0363493 A1, U.S. Pat. No. 8,158,601, WO 2015/123264 A1, and WO 2015/148247 A1, which are incorporated herein by reference in their entirety.

[1003] In one embodiment, the amount of the quaternary amine compound (e.g., DOTAP) in the lipid composition disclosed herein ranges from about 0.01 mol % to about 20 mol %.

[1004] In one embodiment, the amount of the quaternary amine compound (e.g., DOTAP) in the lipid composition disclosed herein ranges from about 0.5 mol % to about 20 mol %, from about 0.5 mol % to about 15 mol %, from about 0.5 mol % to about 10 mol %, from about 1 mol % to about 20 mol %, from about 1 mol % to about 15 mol %, from about 1 mol % to about 10 mol %, from about 2 mol % to about 20 mol %, from about 2 mol % to about 15 mol %, from about 2 mol % to about 10 mol %, from about 3 mol % to about 20 mol %, from about 3 mol % to about 15 mol %, from about 3 mol % to about 10 mol %, from about 4 mol % to about 20 mol %, from about 4 mol % to about 15 mol %, from about 4 mol % to about 10 mol %, from about 5 mol % to about 20 mol %, from about 5 mol % to about 15 mol %, from about 5 mol % to about 10 mol %, from about 6 mol % to about 20 mol %, from about 6 mol % to about 15 mol %, from about 6 mol % to about 10 mol %, from about 7 mol % to about 20 mol %, from about 7 mol % to about 15 mol %, from about 7 mol % to about 10 mol %, from about 8 mol % to about 20 mol %, from about 8 mol % to about 15 mol %, from about 8 mol % to about 10 mol %, from about 9 mol % to about 20 mol %, from about 9 mol % to about 15 mol %, from about 9 mol % to about 10 mol %.

[1005] In one embodiment, the amount of the quaternary amine compound (e.g., DOTAP) in the lipid composition disclosed herein ranges from about 5 mol % to about 10 mol %.

[1006] In one embodiment, the amount of the quaternary amine compound (e.g., DOTAP) in the lipid composition disclosed herein is about 5 mol %. In one embodiment, the amount of the quaternary amine compound (e.g., DOTAP) in the lipid composition disclosed herein is about 10 mol %.

[1007] In some embodiments, the amount of the quaternary amine compound (e.g., DOTAP) is at least about 0.01, 0.02, 0.03, 0.04, 0.05, 0.06, 0.07, 0.08, 0.09, 0.1, 0.2, 0.3, 0.4, 0.5, 0.6, 0.7, 0.8, 0.9, 1, 1.5, 2, 2.5, 3, 3.5, 4, 4.5, 5, 5.5, 6, 6.5, 7, 7.5, 8, 8.5, 9, 9.5, 10, 10.5, 11, 11.5, 12, 12.5, 13, 13.5, 14, 14.5, 15, 15.5, 16, 16.5, 17, 17.5, 18, 18.5, 19, 19.5 or 20 mol % in the lipid composition disclosed herein.

[1008] In one embodiment, the mole ratio of the compound of formula (I) (e.g., Compounds 18, 25, 26 or 48) to the quaternary amine compound (e.g., DOTA) is about 100:1 to about 2.5:1. In one embodiment, the mole ratio of the compound of formula (I) (e.g., Compounds 18, 25, 26 or 48) to the quaternary amine compound (e.g., DOTAP) is about 90:1, about 80:1, about 70:1, about 60:1, about 50:1, about 40:1, about 30:1, about 20:1, about 15:1, about 10:1, about 9:1, about 8:1, about 7:1, about 6:1, about 5:1, or about 2.5:1. In one embodiment, the mole ratio of the compound of formula (I) (e.g., Compounds 18, 25, 26 or 48) to the quaternary amine compound (e.g., DOTAP) in the lipid composition disclosed herein is about 10:1.

[1009] In some aspects, the lipid composition the pharmaceutical compositions disclosed herein does not comprise a quaternary amine compound. In some aspects, the lipid composition of the pharmaceutical compositions disclosed does not comprise DOTAP.

[1010] (iii) Structural Lipids

[1011] The lipid composition of a pharmaceutical composition disclosed herein can comprise one or more structural lipids. As used herein, the term “structural lipid” refers to sterols and also to lipids containing sterol moieties. In some embodiments, the structural lipid is selected from the group consisting of cholesterol, fecosterol, sitosterol, ergosterol, campesterol, stigmasterol, brassicasterol, tomatidine, tomatine, ursolic acid, alpha-tocopherol, and mixtures thereof. In some embodiments, the structural lipid is cholesterol.

[1012] In one embodiment, the amount of the structural lipid (e.g., an sterol such as cholesterol) in the lipid composition of a pharmaceutical composition disclosed herein ranges from about 20 mol % to about 60 mol %, from about 25 mol % to about 55 mol %, from about 30 mol % to about 50 mol %, or from about 35 mol % to about 45 mol %.

[1013] In one embodiment, the amount of the structural lipid (e.g., an sterol such as cholesterol) in the lipid composition disclosed herein ranges from about 25 mol % to about 30 mol %, from about 30 mol % to about 35 mol %, or from about 35 mol % to about 40 mol %.

[1014] In one embodiment, the amount of the structural lipid (e.g., a sterol such as cholesterol) in the lipid composition disclosed herein is about 23.5 mol %, about 28.5 mol %, about 33.5 mol %, or about 38.5 mol %.

[1015] In some embodiments, the amount of the structural lipid (e.g., an sterol such as cholesterol) in the lipid composition disclosed herein is at least about 20, 21, 22, 23, 24, 25, 26, 27, 28, 29, 30, 31, 32, 33, 34, 35, 36, 37, 38, 39, 40, 41, 42, 43, 44, 45, 46, 47, 48, 49, 50, 51, 52, 53, 54, 55, 56, 57, 58, 59, or 60 mol %.

[1016] In some aspects, the lipid composition component of the pharmaceutical compositions for intratumoral delivery disclosed does not comprise cholesterol.

[1017] (iv) Polyethylene Glycol (PEG)-Lipids

[1018] The lipid composition of a pharmaceutical composition disclosed herein can comprise one or more a polyethylene glycol (PEG) lipid.

[1019] As used herein, the term “PEG-lipid” refers to polyethylene glycol (PEG)-modified lipids. Non-limiting examples of PEG-lipids include PEG-modified phosphatidylethanolamine and phosphatidic acid, PEG-ceramide conjugates (e.g., PEG-CerC14 or PEG-CerC20), PEG-modified dialkylamines and PEG-modified 1,2-diacyloxypropan-3-amines. Such lipids are also referred to as PEGylated lipids. For example, a PEG lipid can be PEG-c-DOMG, PEG-DMG, PEG-DLPE, PEG-DMPE, PEG-DPPC, or a PEG-DSPE lipid.

[1020] In some embodiments, the PEG-lipid includes, but not limited to 1,2-dimyristoyl-sn-glycerol methoxypolyethylene glycol (PEG-DMG), 1,2-distearoyl-sn-glycero-3-phosphoethanolamine-N-[amino(polyethylene glycol)] (PEG-DSPE), PEG-disteryl glycerol (PEG-DSG), PEG-dipalmetoleyl, PEG-dioleyl, PEG-distearyl, PEG-diacylglycamide (PEG-DAG), PEG-dipalmitoyl phosphatidylethanolamine (PEG-DPPE), or PEG-1,2-dimyristyloxlpropyl-3-amine (PEG-c-DMA).

[1021] In one embodiment, the PEG-lipid is selected from the group consisting of a PEG-modified phosphatidylethanolamine, a PEG-modified phosphatidic acid, a PEG-modified ceramide, a PEG-modified dialkylamine, a PEG-modified diacylglycerol, a PEG-modified dialkylglycerol, and mixtures thereof.

[1022] In some embodiments, the lipid moiety of the PEG-lipids includes those having lengths of from about C₁₄ to about C₂₂, preferably from about C₁₄ to about C₁₆. In some embodiments, a PEG moiety, for example an mPEG-NH₂, has a size of about 1000, 2000, 5000, 10,000, 15,000 or 20,000 daltons. In one embodiment, the PEG-lipid is PEG₂ₖ-DMG.

[1023] In one embodiment, the lipid nanoparticles described herein can comprise a PEG lipid which is a non-diffusible PEG. Non-limiting examples of non-diffusible PEGs include PEG-DSG and PEG-DSPE.

[1024] PEG-lipids are known in the art, such as those described in U.S. Pat. No. 8,158,601 and International Publ. No. WO 2015/130584 A2, which are incorporated herein by reference in their entirety.

[1025] In one embodiment, the amount of PEG-lipid in the lipid composition of a pharmaceutical composition disclosed herein ranges from about 0.1 mol % to about 5 mol %, from about 0.5 mol % to about 5 mol %, from about 1 mol % to about 5 mol %, from about 1.5 mol % to about 5 mol %, from about 2 mol % to about 5 mol % mol %, from about 0.1 mol % to about 4 mol %, from about 0.5 mol % to about 4 mol %, from about 1 mol % to about 4 mol %, from about 1.5 mol % to about 4 mol %, from about 2 mol % to about 4 mol %, from about 0.1 mol % to about 3 mol %, from about 0.5 mol % to about 3 mol %, from about 1 mol % to about 3 mol %, from about 1.5 mol % to about 3 mol %, from about 2 mol % to about 3 mol %, from about 0.1 mol % to about 2 mol %, from about 0.5 mol % to about 2 mol %, from about 1 mol % to about 2 mol %, from about 1.5 mol % to about 2 mol %, from about 0.1 mol % to about 1.5 mol %, from about 0.5 mol % to about 1.5 mol %, or from about 1 mol % to about 1.5 mol %.

[1026] In one embodiment, the amount of PEG-lipid in the lipid composition disclosed herein is about 1.5 mol %.

[1027] In one embodiment, the amount of PEG-lipid in the lipid composition disclosed herein is at least about 0.1, 0.2, 0.3, 0.4, 0.5, 0.6, 0.7, 0.8, 0.9, 1, 1.1, 1.2, 1.3, 1.4, 1.5, 1.6, 1.7, 1.8, 1.9, 2, 2.1, 2.2, 2.3, 2.4, 2.5, 2.6, 2.7, 2.8, 2.9, 3, 3.1, 3.2, 3.3, 3.4, 3.5, 3.6, 3.7, 3.8, 3.9, 4, 4.1, 4.2, 4.3, 4.4, 4.5, 4.6, 4.7, 4.8, 4.9, or 5 mol %.

[1028] In some aspects, the lipid composition of the pharmaceutical compositions disclosed herein does not comprise a PEG-lipid.

[1029] In some embodiments, the lipid composition disclosed herein comprises a compound of formula (I) and an asymmetric phospholipid. In some embodiments, the lipid composition comprises compound 18 and MSPC.

[1030] In some embodiments, the lipid composition disclosed herein comprises a compound of formula (I) and a quaternary amine compound. In some embodiments, the lipid composition comprises compound 18 and DOTAP.

[1031] In some embodiments, the lipid composition disclosed herein comprises a compound of formula (I), an asymmetric phospholipid, and a quaternary amine compound. In some embodiments, the lipid composition comprises compound 18, MSPC and DOTAP.

[1032] In one embodiment, the lipid composition comprises about 50 mol % of a compound of formula (I) (e.g., Compounds 18, 25, 26 or 48), about 10 mol % of DSPC or MSPC, about 33.5 mol % of cholesterol, about 1.5 mol % of PEG-DMG, and about 5 mol % of DOTAP. In one embodiment, the lipid composition comprises about 50 mol % of a compound of formula (I) (e.g. Compounds 18, 25, 26 or 48), about 10 mol % of DSPC or MSPC, about 28.5 mol % of cholesterol, about 1.5 mol % of PEG-DMG, and about 10 mol % of DOTAP.

[1033] The components of the lipid nanoparticle can be tailored for optimal delivery of the polynucleotides based on the desired outcome. As a non-limiting example, the lipid nanoparticle can comprise 40-60 mol % a compound of formula (I), 8-16 mol % phospholipid, 30-45 mol % cholesterol, 1-5 mol % PEG lipid, and optionally 1-15 mol % quaternary amine compound.

[1034] In some embodiments, the lipid nanoparticle can comprise 45-65 mol % of a compound of formula (I), 5-10 mol % phospholipid, 25-40 mol % cholesterol, 0.5-5 mol % PEG lipid, and optionally 1-15 mol % quaternary amine compound.

[1035] Non-limiting examples of nucleic acid lipid particles are disclosed in U.S. Patent Publication No. 20140121263, herein incorporated by reference in its entirety.

[1036] (v) Other Ionizable Amino Lipids

[1037] The lipid composition of the pharmaceutical composition disclosed herein can comprise one or more ionizable amino lipids in addition to a lipid according to formula (I).

[1038] Ionizable lipids can be selected from the non-limiting group consisting of 3-(didodecylamino)-N1,N1,4-tridodecyl-1-piperazineethanamine (KL10), N1-[2-(didodecylamino)ethyl]-N1,N4,N4-tridodecyl-1,4-piperazinediethanamine (KL22), 14,25-ditridecyl-15,18,21,24-tetraaza-octatriacontane (KL25), 1,2-dilinoleyloxy-N,N-dimethylaminopropane (DLin-DMA), 2,2-dilinoleyl-4-dimethylaminomethyl-[1,3]-dioxolane (DLin-K-DMA), heptatriaconta-6,9,28,31-tetraen-19-yl 4-(dimethylamino)butanoate (DLin-MC3-DMA), 2,2-dilinoleyl-4-(2-dimethylaminoethyl)-[1,3]-dioxolane (DLin-KC2-DMA), 1,2-dioleyloxy-N,N-dimethylaminopropane (DODMA), (13Z,165Z)—N,N-dimethyl-3-nonydocosa-13-16-dien-1-amine (L608), 2-({8-[(3β)-cholest-5-en-3-yloxy]octyl}oxy)-N,N-dimethyl-3-[(9Z,12Z)-octadeca-9,12-dien-1-yl oxy]propan-1-amine (Octyl-CLinDMA), (2R)-2-({8-[(3β)-cholest-5-en-3-yloxy]octyl}oxy)-N,N-dimethyl-3-[(9Z,12Z)-octadeca-9,2-dien-1-yloxy]propan-1-amine (Octyl-CLinDMA (2R)), and (2S)-2-({8-[(3β)-cholest-5-en-3-yloxy]octyl}oxy)-N,N-dimethyl-3-[(9Z,12Z)-octadeca-9,12-dien-1-yloxy]propan-1-amine (Octyl-CLinDMA (2S)). In addition to these, an ionizable amino lipid can also be a lipid including a cyclic amine group.

[1039] Ionizable lipids can also be the compounds disclosed in International Publication No. WO 2015/199952 A1, hereby incorporated by reference in its entirety. For example, the ionizable amino lipids include, but not limited to:

[chemical structure]

[chemical structure]

and any combination thereof.

[1040] (vi) Other Lipid Composition Components

[1041] The lipid composition of a pharmaceutical composition disclosed herein can include one or more components in addition to those described above. For example, the lipid composition can include one or more permeability enhancer molecules, carbohydrates, polymers, surface altering agents (e.g., surfactants), or other components. For example, a permeability enhancer molecule can be a molecule described by U.S. Patent Application Publication No. 2005/0222064. Carbohydrates can include simple sugars (e.g., glucose) and polysaccharides (e.g., glycogen and derivatives and analogs thereof). The lipid composition can include a buffer such as, but not limited to, citrate or phosphate at a pH of 7, salt and/or sugar. Salt and/or sugar can be included in the formulations described herein for isotonicity.

[1042] A polymer can be included in and/or used to encapsulate or partially encapsulate a pharmaceutical composition disclosed herein (e.g., a pharmaceutical composition in lipid nanoparticle form). A polymer can be biodegradable and/or biocompatible. A polymer can be selected from, but is not limited to, polyamines, polyethers, polyamides, polyesters, polycarbamates, polyureas, polycarbonates, polystyrenes, polyimides, polysulfones, polyurethanes, polyacetylenes, polyethylenes, polyethyleneimines, polyisocyanates, polyacrylates, polymethacrylates, polyacrylonitriles, and polyarylates.

[1043] The ratio between the lipid composition and the polynucleotide range can be from about 10:1 to about 60:1 (wt/wt).

[1044] In some embodiments, the ratio between the lipid composition and the polynucleotide can be about 10:1, 11:1, 12:1, 13:1, 14:1, 15:1, 16:1, 17:1, 18:1, 19:1, 20:1, 21:1, 22:1, 23:1, 24:1, 25:1, 26:1, 27:1, 28:1, 29:1, 30:1, 31:1, 32:1, 33:1, 34:1, 35:1, 36:1, 37:1, 38:1, 39:1, 40:1, 41:1, 42:1, 43:1, 44:1, 45:1, 46:1, 47:1, 48:1, 49:1, 50:1, 51:1, 52:1, 53:1, 54:1, 55:1, 56:1, 57:1, 58:1, 59:1 or 60:1 (wt/wt). In some embodiments, the wt/wt ratio of the lipid composition to the polynucleotide encoding a therapeutic agent is about 20:1 or about 15:1.

[1045] In some embodiments, the pharmaceutical composition disclosed herein can contain more than one polypeptides. For example, a pharmaceutical composition disclosed herein can contain two or more polynucleotides (e.g., RNA, e.g., mRNA).

[1046] In one embodiment, the lipid nanoparticles described herein can comprise polynucleotides (e.g., mRNA) in a lipid:polynucleotide weight ratio of 5:1, 10:1, 15:1, 20:1, 25:1, 30:1, 35:1, 40:1, 45:1, 50:1, 55:1, 60:1 or 70:1, or a range or any of these ratios such as, but not limited to, 5:1 to about 10:1, from about 5:1 to about 15:1, from about 5:1 to about 20:1, from about 5:1 to about 25:1, from about 5:1 to about 30:1, from about 5:1 to about 35:1, from about 5:1 to about 40:1, from about 5:1 to about 45:1, from about 5:1 to about 50:1, from about 5:1 to about 55:1, from about 5:1 to about 60:1, from about 5:1 to about 70:1, from about 10:1 to about 15:1, from about 10:1 to about 20:1, from about 10:1 to about 25:1, from about 10:1 to about 30:1, from about 10:1 to about 35:1, from about 10:1 to about 40:1, from about 10:1 to about 45:1, from about 10:1 to about 50:1, from about 10:1 to about 55:1, from about 10:1 to about 60:1, from about 10:1 to about 70:1, from about 15:1 to about 20:1, from about 15:1 to about 25:1, from about 15:1 to about 30:1, from about 15:1 to about 35:1, from about 15:1 to about 40:1, from about 15:1 to about 45:1, from about 15:1 to about 50:1, from about 15:1 to about 55:1, from about 15:1 to about 60:1 or from about 15:1 to about 70:1.

[1047] In one embodiment, the lipid nanoparticles described herein can comprise the polynucleotide in a concentration from approximately 0.1 mg/ml to 2 mg/ml such as, but not limited to, 0.1 mg/ml, 0.2 mg/ml, 0.3 mg/ml, 0.4 mg/ml, 0.5 mg/ml, 0.6 mg/ml, 0.7 mg/ml, 0.8 mg/ml, 0.9 mg/ml, 1.0 mg/ml, 1.1 mg/ml, 1.2 mg/ml, 1.3 mg/ml, 1.4 mg/ml, 1.5 mg/ml, 1.6 mg/ml, 1.7 mg/ml, 1.8 mg/ml, 1.9 mg/ml, 2.0 mg/ml or greater than 2.0 mg/ml.

[1048] In one embodiment, formulations comprising the polynucleotides and lipid nanoparticles described herein can comprise 0.15 mg/ml to 2 mg/ml of the polynucleotide described herein (e.g., mRNA). In some embodiments, the formulation can further comprise 10 mM of citrate buffer and the formulation can additionally comprise up to 10% w/w of sucrose (e.g., at least 1% w/w, at least 2% w/w/, at least 3% w/w, at least 4% w/w, at least 5% w/w, at least 6% w/w, at least 7% w/w, at least 8% w/w, at least 9% w/w or 10% w/w).

[1049] (vii) Nanoparticle Compositions

[1050] In some embodiments, the pharmaceutical compositions disclosed herein are formulated as lipid nanoparticles (LNP). Accordingly, the present disclosure also provides nanoparticle compositions comprising (i) a lipid composition comprising a compound of formula (I) as described herein, and (ii) a polynucleotide encoding an MCM polypeptide. In such nanoparticle composition, the lipid composition disclosed herein can encapsulate the polynucleotide encoding an MCM polypeptide.

[1051] Nanoparticle compositions are typically sized on the order of micrometers or smaller and can include a lipid bilayer. Nanoparticle compositions encompass lipid nanoparticles (LNPs), liposomes (e.g., lipid vesicles), and lipoplexes. For example, a nanoparticle composition can be a liposome having a lipid bilayer with a diameter of 500 nm or less.

[1052] Nanoparticle compositions include, for example, lipid nanoparticles (LNPs), liposomes, and lipoplexes. In some embodiments, nanoparticle compositions are vesicles including one or more lipid bilayers. In certain embodiments, a nanoparticle composition includes two or more concentric bilayers separated by aqueous compartments. Lipid bilayers can be functionalized and/or crosslinked to one another. Lipid bilayers can include one or more ligands, proteins, or channels.

[1053] Nanoparticle compositions of the present disclosure comprise at least one compound according to formula (I). For example, the nanoparticle composition can include one or more of Compounds 1-147. Nanoparticle compositions can also include a variety of other components. For example, the nanoparticle composition can include one or more other lipids in addition to a lipid according to formula (I) or (II), for example (i) at least one phospholipid, (ii) at least one quaternary amine compound, (iii) at least one structural lipid, (iv) at least one PEG-lipid, or (v) any combination thereof.

[1054] In some embodiments, the nanoparticle composition comprises a compound of formula (I), (e.g., Compounds 18, 25, 26 or 48). In some embodiments, the nanoparticle composition comprises a compound of formula (I) (e.g., Compounds 18, 25, 26 or 48) and a phospholipid (e.g., DSPC or MSPC). In some embodiments, the nanoparticle composition comprises a compound of formula (I) (e.g., Compounds 18, 25, 26 or 48), a phospholipid (e.g., DSPC or MSPC), and a quaternary amine compound (e.g., DOTAP). In some embodiments, the nanoparticle composition comprises a compound of formula (I) (e.g., Compounds 18, 25, 26 or 48), and a quaternary amine compound (e.g., DOTAP).

[1055] In some embodiments, the nanoparticle composition comprises a lipid composition consisting or consisting essentially of compound of formula (I) (e.g., Compounds 18, 25, 26 or 48). In some embodiments, the nanoparticle composition comprises a lipid composition consisting or consisting essentially of a compound of formula (I) (e.g., Compounds 18, 25, 26 or 48) and a phospholipid (e.g., DSPC or MSPC). In some embodiments, the nanoparticle composition comprises a lipid composition consisting or consisting essentially of a compound of formula (I) (e.g., Compounds 18, 25, 26 or 48), a phospholipid (e.g., DSPC or MSPC), and a quaternary amine compound (e.g., DOTAP). In some embodiments, the nanoparticle composition comprises a lipid composition consisting or consisting essentially of a compound of formula (I) (e.g., Compounds 18, 25, 26 or 48), and a quaternary amine compound (e.g., DOTAP).

[1056] Nanoparticle compositions can be characterized by a variety of methods. For example, microscopy (e.g., transmission electron microscopy or scanning electron microscopy) can be used to examine the morphology and size distribution of a nanoparticle composition. Dynamic light scattering or potentiometry (e.g., potentiometric titrations) can be used to measure zeta potentials. Dynamic light scattering can also be utilized to determine particle sizes. Instruments such as the Zetasizer Nano ZS (Malvern Instruments Ltd, Malvern, Worcestershire, UK) can also be used to measure multiple characteristics of a nanoparticle composition, such as particle size, polydispersity index, and zeta potential.

[1057] The size of the nanoparticles can help counter biological reactions such as, but not limited to, inflammation, or can increase the biological effect of the polynucleotide.

[1058] As used herein, “size” or “mean size” in the context of nanoparticle compositions refers to the mean diameter of a nanoparticle composition.

[1059] In one embodiment, the polynucleotide encoding an MCM polypeptide are formulated in lipid nanoparticles having a diameter from about 10 to about 100 nm such as, but not limited to, about 10 to about 20 nm, about 10 to about 30 nm, about 10 to about 40 nm, about 10 to about 50 nm, about 10 to about 60 nm, about 10 to about 70 nm, about 10 to about 80 nm, about 10 to about 90 nm, about 20 to about 30 nm, about 20 to about 40 nm, about 20 to about 50 nm, about 20 to about 60 nm, about 20 to about 70 nm, about 20 to about 80 nm, about 20 to about 90 nm, about 20 to about 100 nm, about 30 to about 40 nm, about 30 to about 50 nm, about 30 to about 60 nm, about 30 to about 70 nm, about 30 to about 80 nm, about 30 to about 90 nm, about 30 to about 100 nm, about 40 to about 50 nm, about 40 to about 60 nm, about 40 to about 70 nm, about 40 to about 80 nm, about 40 to about 90 nm, about 40 to about 100 nm, about 50 to about 60 nm, about 50 to about 70 nm, about 50 to about 80 nm, about 50 to about 90 nm, about 50 to about 100 nm, about 60 to about 70 nm, about 60 to about 80 nm, about 60 to about 90 nm, about 60 to about 100 nm, about 70 to about 80 nm, about 70 to about 90 nm, about 70 to about 100 nm, about 80 to about 90 nm, about 80 to about 100 nm and/or about 90 to about 100 nm.

[1060] In one embodiment, the nanoparticles have a diameter from about 10 to 500 nm. In one embodiment, the nanoparticle has a diameter greater than 100 nm, greater than 150 nm, greater than 200 nm, greater than 250 nm, greater than 300 nm, greater than 350 nm, greater than 400 nm, greater than 450 nm, greater than 500 nm, greater than 550 nm, greater than 600 nm, greater than 650 nm, greater than 700 nm, greater than 750 nm, greater than 800 nm, greater than 850 nm, greater than 900 nm, greater than 950 nm or greater than 1000 nm.

[1061] In some embodiments, the largest dimension of a nanoparticle composition is 1 μm or shorter (e.g., 1 μm, 900 nm, 800 nm, 700 nm, 600 nm, 500 nm, 400 nm, 300 nm, 200 nm, 175 nm, 150 nm, 125 nm, 100 nm, 75 nm, 50 nm, or shorter).

[1062] A nanoparticle composition can be relatively homogenous. A polydispersity index can be used to indicate the homogeneity of a nanoparticle composition, e.g., the particle size distribution of the nanoparticle composition. A small (e.g., less than 0.3) polydispersity index generally indicates a narrow particle size distribution. A nanoparticle composition can have a polydispersity index from about 0 to about 0.25, such as 0.01, 0.02, 0.03, 0.04, 0.05, 0.06, 0.07, 0.08, 0.09, 0.10, 0.11, 0.12, 0.13, 0.14, 0.15, 0.16, 0.17, 0.18, 0.19, 0.20, 0.21, 0.22, 0.23, 0.24, or 0.25. In some embodiments, the polydispersity index of a nanoparticle composition disclosed herein can be from about 0.10 to about 0.20.

[1063] The zeta potential of a nanoparticle composition can be used to indicate the electrokinetic potential of the composition. For example, the zeta potential can describe the surface charge of a nanoparticle composition. Nanoparticle compositions with relatively low charges, positive or negative, are generally desirable, as more highly charged species can interact undesirably with cells, tissues, and other elements in the body. In some embodiments, the zeta potential of a nanoparticle composition disclosed herein can be from about −10 mV to about +20 mV, from about −10 mV to about +15 mV, from about 10 mV to about +10 mV, from about −10 mV to about +5 mV, from about −10 mV to about 0 mV, from about −10 mV to about −5 mV, from about −5 mV to about +20 mV, from about −5 mV to about +15 mV, from about −5 mV to about +10 mV, from about −5 mV to about +5 mV, from about −5 mV to about 0 mV, from about 0 mV to about +20 mV, from about 0 mV to about +15 mV, from about 0 mV to about +10 mV, from about 0 mV to about +5 mV, from about +5 mV to about +20 mV, from about +5 mV to about +15 mV, or from about +5 mV to about +10 mV.

[1064] In some embodiments, the zeta potential of the lipid nanoparticles can be from about 0 mV to about 100 mV, from about 0 mV to about 90 mV, from about 0 mV to about 80 mV, from about 0 mV to about 70 mV, from about 0 mV to about 60 mV, from about 0 mV to about 50 mV, from about 0 mV to about 40 mV, from about 0 mV to about 30 mV, from about 0 mV to about 20 mV, from about 0 mV to about 10 mV, from about 10 mV to about 100 mV, from about 10 mV to about 90 mV, from about 10 mV to about 80 mV, from about 10 mV to about 70 mV, from about 10 mV to about 60 mV, from about 10 mV to about 50 mV, from about 10 mV to about 40 mV, from about 10 mV to about 30 mV, from about 10 mV to about 20 mV, from about 20 mV to about 100 mV, from about 20 mV to about 90 mV, from about 20 mV to about 80 mV, from about 20 mV to about 70 mV, from about 20 mV to about 60 mV, from about 20 mV to about 50 mV, from about 20 mV to about 40 mV, from about 20 mV to about 30 mV, from about 30 mV to about 100 mV, from about 30 mV to about 90 mV, from about 30 mV to about 80 mV, from about 30 mV to about 70 mV, from about 30 mV to about 60 mV, from about 30 mV to about 50 mV, from about 30 mV to about 40 mV, from about 40 mV to about 100 mV, from about 40 mV to about 90 mV, from about 40 mV to about 80 mV, from about 40 mV to about 70 mV, from about 40 mV to about 60 mV, and from about 40 mV to about 50 mV. In some embodiments, the zeta potential of the lipid nanoparticles can be from about 10 mV to about 50 mV, from about 15 mV to about 45 mV, from about 20 mV to about 40 mV, and from about 25 mV to about 35 mV. In some embodiments, the zeta potential of the lipid nanoparticles can be about 10 mV, about 20 mV, about 30 mV, about 40 mV, about 50 mV, about 60 mV, about 70 mV, about 80 mV, about 90 mV, and about 100 mV.

[1065] The term “encapsulation efficiency” of a polynucleotide describes the amount of the polynucleotide that is encapsulated by or otherwise associated with a nanoparticle composition after preparation, relative to the initial amount provided. As used herein, “encapsulation” can refer to complete, substantial, or partial enclosure, confinement, surrounding, or encasement.

[1066] Encapsulation efficiency is desirably high (e.g., close to 100%). The encapsulation efficiency can be measured, for example, by comparing the amount of the polynucleotide in a solution containing the nanoparticle composition before and after breaking up the nanoparticle composition with one or more organic solvents or detergents.

[1067] Fluorescence can be used to measure the amount of free polynucleotide in a solution. For the nanoparticle compositions described herein, the encapsulation efficiency of a polynucleotide can be at least 50%, for example 50%, 55%, 60%, 65%, 70%, 75%, 80%, 85%, 90%, 91%, 92%, 93%, 94%, 95%, 96%, 97%, 98%, 99%, or 100%. In some embodiments, the encapsulation efficiency can be at least 80%. In certain embodiments, the encapsulation efficiency can be at least 90%.

[1068] The amount of a polynucleotide present in a pharmaceutical composition disclosed herein can depend on multiple factors such as the size of the polynucleotide, desired target and/or application, or other properties of the nanoparticle composition as well as on the properties of the polynucleotide.

[1069] For example, the amount of an mRNA useful in a nanoparticle composition can depend on the size (expressed as length, or molecular mass), sequence, and other characteristics of the mRNA. The relative amounts of a polynucleotide in a nanoparticle composition can also vary.

[1070] The relative amounts of the lipid composition and the polynucleotide present in a lipid nanoparticle composition of the present disclosure can be optimized according to considerations of efficacy and tolerability. For compositions including an mRNA as a polynucleotide, the N:P ratio can serve as a useful metric.

[1071] As the N:P ratio of a nanoparticle composition controls both expression and tolerability, nanoparticle compositions with low N:P ratios and strong expression are desirable. N:P ratios vary according to the ratio of lipids to RNA in a nanoparticle composition.

[1072] In general, a lower N:P ratio is preferred. The one or more RNA, lipids, and amounts thereof can be selected to provide an N:P ratio from about 2:1 to about 30:1, such as 2:1, 3:1, 4:1, 5:1, 6:1, 7:1, 8:1, 9:1, 10:1, 12:1, 14:1, 16:1, 18:1, 20:1, 22:1, 24:1, 26:1, 28:1, or 30:1. In certain embodiments, the N:P ratio can be from about 2:1 to about 8:1. In other embodiments, the N:P ratio is from about 5:1 to about 8:1. In certain embodiments, the N:P ratio is between 5:1 and 6:1. In one specific aspect, the N:P ratio is about is about 5.67:1.

[1073] In addition to providing nanoparticle compositions, the present disclosure also provides methods of producing lipid nanoparticles comprising encapsulating a polynucleotide. Such method comprises using any of the pharmaceutical compositions disclosed herein and producing lipid nanoparticles in accordance with methods of production of lipid nanoparticles known in the art. See, e.g., Wang et al. (2015) “Delivery of oligonucleotides with lipid nanoparticles” Adv. Drug Deliv. Rev. 87:68-80; Silva et al. (2015) “Delivery Systems for Biopharmaceuticals. Part I: Nanoparticles and Microparticles” Curr. Pharm. Technol. 16: 940-954; Naseri et al. (2015) “Solid Lipid Nanoparticles and Nanostructured Lipid Carriers: Structure, Preparation and Application” Adv. Pharm. Bull. 5:305-13; Silva et al. (2015) “Lipid nanoparticles for the delivery of biopharmaceuticals” Curr. Pharm. Biotechnol. 16:291-302, and references cited therein.

### Excipients

[1074] The disclosure also includes pharmaceutical compositions that comprise a formulation of a polynucleotide described herein, i.e., a polynucleotide comprising an ORF encoding an MCM polypeptide, with excipients. The polynucleotides of the disclosure can be formulated using one or more excipients to: (1) increase stability; (2) increase cell transfection; (3) permit the sustained or delayed release (e.g., from a depot formulation of the polynucleotide); (4) alter the biodistribution (e.g., target the polynucleotide to specific tissues or cell types); (5) increase the translation of encoded protein in vivo; and/or (6) alter the release profile of encoded protein in vivo. In addition to traditional excipients such as any and all solvents, dispersion media, diluents, or other liquid vehicles, dispersion or suspension aids, surface active agents, isotonic agents, thickening or emulsifying agents, preservatives, excipients of the present disclosure can include, without limitation, lipidoids, liposomes, lipid nanoparticles, polymers, lipoplexes, core-shell nanoparticles, peptides, proteins, cells transfected with polynucleotides (e.g., for transplantation into a subject), hyaluronidase, nanoparticle mimics and combinations thereof. Accordingly, the formulations of the disclosure can include one or more excipients, each in an amount that together increases the stability of the polynucleotide, increases cell transfection by the polynucleotide, increases the expression of polynucleotides encoded protein, and/or alters the release profile of polynucleotide encoded proteins. Further, the polynucleotides of the present disclosure can be formulated using self-assembled nucleic acid nanoparticles.

[1075] A pharmaceutically acceptable excipient, as used herein, includes, but are not limited to, any and all solvents, dispersion media, diluents, or other liquid vehicles, dispersion or suspension aids, surface active agents, isotonic agents, thickening or emulsifying agents, preservatives, solid binders, lubricants, flavoring agents, stabilizers, antioxidants, osmolality adjusting agents, pH adjusting agents and the like, as suited to the particular dosage form desired. Various excipients for formulating pharmaceutical compositions and techniques for preparing the composition are known in the art (see Remington: The Science and Practice of Pharmacy, 21^{st} Edition, A. R. Gennaro (Lippincott, Williams & Wilkins, Baltimore, Md., 2006; incorporated herein by reference in its entirety). The use of a conventional excipient medium can be contemplated within the scope of the present disclosure, except insofar as any conventional excipient medium is incompatible with a substance or its derivatives, such as by producing any undesirable biological effect or otherwise interacting in a deleterious manner with any other component(s) of the pharmaceutical composition, its use is contemplated to be within the scope of this disclosure.

[1076] In some embodiments, a pharmaceutically acceptable excipient can be at least 95%, at least 96%, at least 97%, at least 98%, at least 99%, or 100% pure. In some embodiments, an excipient is approved for use for humans and for veterinary use. In some embodiments, an excipient can be approved by United States Food and Drug Administration. In some embodiments, an excipient can be of pharmaceutical grade. In some embodiments, an excipient can meet the standards of the United States Pharmacopoeia (USP), the European Pharmacopoeia (EP), the British Pharmacopoeia, and/or the International Pharmacopoeia.

[1077] Pharmaceutically acceptable excipients used in the manufacture of pharmaceutical compositions include, but are not limited to, inert diluents, dispersing and/or granulating agents, surface active agents and/or emulsifiers, disintegrating agents, binding agents, preservatives, buffering agents, lubricating agents, and/or oils. Such excipients can optionally be included in pharmaceutical compositions. The composition can also include excipients such as cocoa butter and suppository waxes, coloring agents, coating agents, sweetening, flavoring, and/or perfuming agents.

[1078] Exemplary diluents include, but are not limited to, calcium carbonate, sodium carbonate, calcium phosphate, dicalcium phosphate, calcium sulfate, calcium hydrogen phosphate, sodium phosphate lactose, sucrose, cellulose, microcrystalline cellulose, kaolin, mannitol, sorbitol, inositol, sodium chloride, dry starch, cornstarch, powdered sugar, etc., and/or combinations thereof.

[1079] Exemplary granulating and/or dispersing agents include, but are not limited to, potato starch, corn starch, tapioca starch, sodium starch glycolate, clays, alginic acid, guar gum, citrus pulp, agar, bentonite, cellulose and wood products, natural sponge, cation-exchange resins, calcium carbonate, silicates, sodium carbonate, cross-linked poly(vinyl-pyrrolidone) (crospovidone), sodium carboxymethyl starch (sodium starch glycolate), carboxymethyl cellulose, cross-linked sodium carboxymethyl cellulose (croscarmellose), methylcellulose, pregelatinized starch (starch 1500), microcrystalline starch, water insoluble starch, calcium carboxymethyl cellulose, magnesium aluminum silicate (VEEGUM®), sodium lauryl sulfate, quaternary ammonium compounds, etc., and/or combinations thereof.

[1080] Exemplary surface active agents and/or emulsifiers include, but are not limited to, natural emulsifiers (e.g. acacia, agar, alginic acid, sodium alginate, tragacanth, chondrux, cholesterol, xanthan, pectin, gelatin, egg yolk, casein, wool fat, cholesterol, wax, and lecithin), colloidal clays (e.g., bentonite [aluminum silicate] and VEEGUM® [magnesium aluminum silicate]), long chain amino acid derivatives, high molecular weight alcohols (e.g., stearyl alcohol, cetyl alcohol, oleyl alcohol, triacetin monostearate, ethylene glycol distearate, glyceryl monostearate, and propylene glycol monostearate, polyvinyl alcohol), carbomers (e.g., carboxy polymethylene, polyacrylic acid, acrylic acid polymer, and carboxyvinyl polymer), carrageenan, cellulosic derivatives (e.g., carboxymethylcellulose sodium, powdered cellulose, hydroxymethyl cellulose, hydroxypropyl cellulose, hydroxypropyl methylcellulose, methylcellulose), sorbitan fatty acid esters (e.g., polyoxyethylene sorbitan monolaurate [TWEEN®20], polyoxyethylene sorbitan [TWEEN®60], polyoxyethylene sorbitan monooleate [TWEEN®80], sorbitan monopalmitate [SPAN®40], sorbitan monostearate [SPAN®60], sorbitan tristearate [SPAN®65], glyceryl monooleate, sorbitan monooleate [SPAN®80]), polyoxyethylene esters (e.g., polyoxyethylene monostearate [MYRJ®45], polyoxyethylene hydrogenated castor oil, polyethoxylated castor oil, polyoxymethylene stearate, and SOLUTOL®), sucrose fatty acid esters, polyethylene glycol fatty acid esters (e.g., CREMOPHOR®), polyoxyethylene ethers, (e.g., polyoxyethylene lauryl ether [BRIJ®30]), poly(vinyl-pyrrolidone), diethylene glycol monolaurate, triethanolamine oleate, sodium oleate, potassium oleate, ethyl oleate, oleic acid, ethyl laurate, sodium lauryl sulfate, PLUORINC® F 68, POLOXAMER®188, cetrimonium bromide, cetylpyridinium chloride, benzalkonium chloride, docusate sodium, etc. and/or combinations thereof.

[1081] Exemplary binding agents include, but are not limited to, starch (e.g., cornstarch and starch paste); gelatin; sugars (e.g., sucrose, glucose, dextrose, dextrin, molasses, lactose, lactitol, mannitol); amino acids (e.g., glycine); natural and synthetic gums (e.g., acacia, sodium alginate, extract of Irish moss, panwar gum, ghatti gum, mucilage of isapol husks, carboxymethylcellulose, methylcellulose, ethylcellulose, hydroxyethylcellulose, hydroxypropyl cellulose, hydroxypropyl methylcellulose, microcrystalline cellulose, cellulose acetate, poly(vinyl-pyrrolidone), magnesium aluminum silicate (VEEGUM®), and larch arabogalactan); alginates; polyethylene oxide; polyethylene glycol; inorganic calcium salts; silicic acid; polymethacrylates; waxes; water; alcohol; etc.; and combinations thereof.

[1082] Exemplary preservatives can include, but are not limited to, antioxidants, chelating agents, antimicrobial preservatives, antifungal preservatives, alcohol preservatives, acidic preservatives, and/or other preservatives. Oxidation is a potential degradation pathway for mRNA, especially for liquid mRNA formulations. In order to prevent oxidation, antioxidants can be added to the formulation. Exemplary antioxidants include, but are not limited to, alpha tocopherol, ascorbic acid, acorbyl palmitate, benzyl alcohol, butylated hydroxyanisole, EDTA, m-cresol, methionine, butylated hydroxytoluene, monothioglycerol, potassium metabisulfite, propionic acid, propyl gallate, sodium ascorbate, sodium bisulfite, sodium metabisulfite, thioglycerol and/or sodium sulfite. Exemplary chelating agents include ethylenediaminetetraacetic acid (EDTA), citric acid monohydrate, disodium edetate, dipotassium edetate, edetic acid, fumaric acid, malic acid, phosphoric acid, sodium edetate, tartaric acid, and/or trisodium edetate. Exemplary antimicrobial preservatives include, but are not limited to, benzalkonium chloride, benzethonium chloride, benzyl alcohol, bronopol, cetrimide, cetylpyridinium chloride, chlorhexidine, chlorobutanol, chlorocresol, chloroxylenol, cresol, ethyl alcohol, glycerin, hexetidine, imidurea, phenol, phenoxyethanol, phenylethyl alcohol, phenylmercuric nitrate, propylene glycol, and/or thimerosal. Exemplary antifungal preservatives include, but are not limited to, butyl paraben, methyl paraben, ethyl paraben, propyl paraben, benzoic acid, hydroxybenzoic acid, potassium benzoate, potassium sorbate, sodium benzoate, sodium propionate, and/or sorbic acid. Exemplary alcohol preservatives include, but are not limited to, ethanol, polyethylene glycol, phenol, phenolic compounds, bisphenol, chlorobutanol, hydroxybenzoate, and/or phenylethyl alcohol. Exemplary acidic preservatives include, but are not limited to, vitamin A, vitamin C, vitamin E, beta-carotene, citric acid, acetic acid, dehydroacetic acid, ascorbic acid, sorbic acid, and/or phytic acid. Other preservatives include, but are not limited to, tocopherol, tocopherol acetate, deteroxime mesylate, cetrimide, butylated hydroxyanisol (BHA), butylated hydroxytoluened (BHT), ethylenediamine, sodium lauryl sulfate (SLS), sodium lauryl ether sulfate (SLES), sodium bisulfite, sodium metabisulfite, potassium sulfite, potassium metabisulfite, GLYDANT PLUS®, PHENONIP®, methylparaben, GERMALL® 15, GERMABEN® II, NEOLONE™, KATHON™, and/or EUXYL®.

[1083] In some embodiments, the pH of polynucleotide solutions are maintained between pH 5 and pH 8 to improve stability. Exemplary buffers to control pH can include, but are not limited to sodium phosphate, sodium citrate, sodium succinate, histidine (or histidine-HCl), sodium carbonate, and/or sodium malate. In another embodiment, the exemplary buffers listed above can be used with additional monovalent counterions (including, but not limited to potassium). Divalent cations can also be used as buffer counterions; however, these are subject to complex formation and/or mRNA degradation.

[1084] Exemplary buffering agents can also include, but are not limited to, citrate buffer solutions, acetate buffer solutions, phosphate buffer solutions, ammonium chloride, calcium carbonate, calcium chloride, calcium citrate, calcium glubionate, calcium gluceptate, calcium gluconate, D-gluconic acid, calcium glycerophosphate, calcium lactate, propanoic acid, calcium levulinate, pentanoic acid, dibasic calcium phosphate, phosphoric acid, tribasic calcium phosphate, calcium hydroxide phosphate, potassium acetate, potassium chloride, potassium gluconate, potassium mixtures, dibasic potassium phosphate, monobasic potassium phosphate, potassium phosphate mixtures, sodium acetate, sodium bicarbonate, sodium chloride, sodium citrate, sodium lactate, dibasic sodium phosphate, monobasic sodium phosphate, sodium phosphate mixtures, tromethamine, magnesium hydroxide, aluminum hydroxide, alginic acid, pyrogen-free water, isotonic saline, Ringer's solution, ethyl alcohol, etc., and/or combinations thereof.

[1085] Exemplary lubricating agents include, but are not limited to, magnesium stearate, calcium stearate, stearic acid, silica, talc, malt, glyceryl behanate, hydrogenated vegetable oils, polyethylene glycol, sodium benzoate, sodium acetate, sodium chloride, leucine, magnesium lauryl sulfate, sodium lauryl sulfate, etc., and combinations thereof.

[1086] Exemplary oils include, but are not limited to, almond, apricot kernel, avocado, babassu, bergamot, black current seed, borage, cade, camomile, canola, caraway, carnauba, castor, cinnamon, cocoa butter, coconut, cod liver, coffee, corn, cotton seed, emu, eucalyptus, evening primrose, fish, flaxseed, geraniol, gourd, grape seed, hazel nut, hyssop, isopropyl myristate, jojoba, kukui nut, lavandin, lavender, lemon, litsea cubeba, macademia nut, mallow, mango seed, meadowfoam seed, mink, nutmeg, olive, orange, orange roughy, palm, palm kernel, peach kernel, peanut, poppy seed, pumpkin seed, rapeseed, rice bran, rosemary, safflower, sandalwood, sasquana, savoury, sea buckthorn, sesame, shea butter, silicone, soybean, sunflower, tea tree, thistle, tsubaki, vetiver, walnut, and wheat germ oils. Exemplary oils include, but are not limited to, butyl stearate, caprylic triglyceride, capric triglyceride, cyclomethicone, diethyl sebacate, dimethicone 360, isopropyl myristate, mineral oil, octyldodecanol, oleyl alcohol, silicone oil, and/or combinations thereof.

[1087] Excipients such as cocoa butter and suppository waxes, coloring agents, coating agents, sweetening, flavoring, and/or perfuming agents can be present in the composition, according to the judgment of the formulator.

[1088] Exemplary additives include physiologically biocompatible buffers (e.g., trimethylamine hydrochloride), addition of chelants (such as, for example, DTPA or DTPA-bisamide) or calcium chelate complexes (as for example calcium DTPA, CaNaDTPA-bisamide), or, optionally, additions of calcium or sodium salts (for example, calcium chloride, calcium ascorbate, calcium gluconate or calcium lactate). In addition, antioxidants and suspending agents can be used.

### Lipidoids

[1089] The disclosure includes pharmaceutical compositions that comprise a lipidoid formulation of the polynucleotide described herein, i.e., a polynucleotide comprising an ORF encoding an MCM polypeptide.

[1090] The synthesis of lipidoids has been extensively described and formulations containing these compounds are particularly suited for delivery of polynucleotides (see Mahon et al., Bioconjug. Chem. 2010 21:1448-1454; Schroeder et al., J Intern Med. 2010 267:9-21; Akinc et al., Nat Biotechnol. 2008 26:561-569; Love et al., Proc Natl Acad Sci USA. 2010 107:1864-1869; Siegwart et al., Proc Natl Acad Sci USA. 2011 108:12996-3001; all of which are incorporated herein in their entireties).

[1091] Lipidoids have been used to effectively deliver double stranded small interfering RNA molecules in rodents and non-human primates (see Akinc et al., Nat Biotechnol. 2008 26:561-569; Frank-Kamenetsky et al., Proc Natl Acad Sci USA. 2008 105:11915-11920; Akinc et al., Mol Ther. 2009 17:872-879; Love et al., Proc Natl Acad Sci USA. 2010 107:1864-1869; Leuschner et al., Nat Biotechnol. 2011 29:1005-1010; all of which is incorporated herein in their entirety), and the present disclosure describes their formulation and use in delivering polynucleotides.

[1092] Complexes, micelles, liposomes or particles can be prepared containing these lipidoids and therefore, can result in an effective delivery of the polynucleotide, as judged by the production of an encoded protein, following the injection of a lipidoid formulation via localized and/or systemic routes of administration. Lipidoid complexes of polynucleotides can be administered by various means including, but not limited to, intravenous, intramuscular, or subcutaneous routes.

[1093] In vivo delivery of nucleic acids can be affected by many parameters, including, but not limited to, the formulation composition, nature of particle PEGylation, degree of loading, polynucleotide to lipid ratio, and biophysical parameters such as, but not limited to, particle size (Akinc et al., Mol Ther. 2009 17:872-879; herein incorporated by reference in its entirety). As an example, small changes in the anchor chain length of poly(ethylene glycol) (PEG) lipids can result in significant effects on in vivo efficacy. Formulations with the different lipidoids, including, but not limited to penta[3-(1-laurylaminopropionyl)]-triethylenetetramine hydrochloride (TETA-5LAP; aka 98N12-5, see Murugaiah et al., Analytical Biochemistry, 401:61 (2010); herein incorporated by reference in its entirety), C12-200 (including derivatives and variants), and MD1, can be tested for in vivo activity.

[1094] The lipidoid referred to herein as “98N12-5” is disclosed by Akinc et al., Mol Ther. 2009 17:872-879 and is incorporated by reference in its entirety.

[1095] The lipidoid referred to herein as “C12-200” is disclosed by Love et al., Proc Natl Acad Sci USA. 2010 107:1864-1869 and Liu and Huang, Molecular Therapy. 2010 669-670; both of which are herein incorporated by reference in their entirety. The lipidoid formulations can include particles comprising either 3 or 4 or more components in addition to polynucleotides.

[1096] Lipidoids and polynucleotide formulations comprising lipidoids are described in International Patent Application No. PCT/US2014/097077, the contents of which are herein incorporated by reference in its entirety.

### Liposomes, Lipoplexes, and Lipid Nanoparticles

[1097] The disclosure also includes pharmaceutical compositions that comprise a formulation of the polynucleotide described herein, i.e., a polynucleotide comprising an ORF encoding an MCM polypeptide, using one or more liposomes, lipoplexes, or lipid nanoparticles. In one embodiment, pharmaceutical compositions of the polynucleotides include liposomes. Liposomes are artificially-prepared vesicles that can primarily be composed of a lipid bilayer and can be used as a delivery vehicle for the administration of nutrients and pharmaceutical formulations. Liposomes can be of different sizes such as, but not limited to, a multilamellar vesicle (MLV) that can be hundreds of nanometers in diameter and can contain a series of concentric bilayers separated by narrow aqueous compartments, a small unicellular vesicle (SUV) that can be smaller than 50 nm in diameter, and a large unilamellar vesicle (LUV) that can be between 50 and 500 nm in diameter. Liposome design can include, but is not limited to, opsonins or ligands in order to improve the attachment of liposomes to unhealthy tissue or to activate events such as, but not limited to, endocytosis. Liposomes can contain a low or a high pH in order to improve the delivery of the pharmaceutical formulations.

[1098] The formation of liposomes can depend on the physicochemical characteristics such as, but not limited to, the pharmaceutical formulation entrapped and the liposomal ingredients, the nature of the medium in which the lipid vesicles are dispersed, the effective concentration of the entrapped substance and its potential toxicity, any additional processes involved during the application and/or delivery of the vesicles, the optimization size, polydispersity and the shelf-life of the vesicles for the intended application, and the batch-to-batch reproducibility and possibility of large-scale production of safe and efficient liposomal products.

[1099] As a non-limiting example, liposomes such as synthetic membrane vesicles can be prepared by the methods, apparatus and devices described in US Patent Publication No. US20130177638, US20130177637, US20130177636, US20130177635, US20130177634, US20130177633, US20130183375, US20130183373 and US20130183372, the contents of each of which are herein incorporated by reference in its entirety.

[1100] In one embodiment, pharmaceutical compositions described herein can include, without limitation, liposomes such as those formed from 1,2-dioleyloxy-N,N-dimethylaminopropane (DODMA) liposomes, DiLa2 liposomes from Marina Biotech (Bothell, Wash.), 1,2-dilinoleyloxy-3-dimethylaminopropane (DLin-DMA), 2,2-dilinoleyl-4-(2-dimethylaminoethyl)-[1,3]-dioxolane (DLin-KC2-DMA), and MC3 (US20100324120; herein incorporated by reference in its entirety) and liposomes that can deliver small molecule drugs such as, but not limited to, DOXIL® from Janssen Biotech, Inc. (Horsham, Pa.).

[1101] In one embodiment, pharmaceutical compositions described herein can include, without limitation, liposomes such as those formed from the synthesis of stabilized plasmid-lipid particles (SPLP) or stabilized nucleic acid lipid particle (SNALP) that have been previously described and shown to be suitable for oligonucleotide delivery in vitro and in vivo (see Wheeler et al. Gene Therapy. 1999 6:271-281; Zhang et al. Gene Therapy. 1999 6:1438-1447; Jeffs et al. Pharm Res. 2005 22:362-372; Morrissey et al., Nat Biotechnol. 2005 2:1002-1007; Zimmermann et al., Nature. 2006 441:111-114; Heyes et al. J Contr Rel. 2005 107:276-287; Semple et al. Nature Biotech. 2010 28:172-176; Judge et al. J Clin Invest. 2009 119:661-673; deFougerolles Hum Gene Ther. 2008 19:125-132; U.S. Patent Publication No US20130122104; all of which are incorporated herein in their entireties). The original manufacture method by Wheeler et al. was a detergent dialysis method, which was later improved by Jeffs et al. and is referred to as the spontaneous vesicle formation method. The liposome formulations are composed of 3 to 4 lipid components in addition to the polynucleotide. As an example a liposome can contain, but is not limited to, 55% cholesterol, 20% disteroylphosphatidyl choline (DSPC), 10% PEG-S-DSG, and 15% 1,2-dioleyloxy-N,N-dimethylaminopropane (DODMA), as described by Jeffs et al. As another example, certain liposome formulations can contain, but are not limited to, 48% cholesterol, 20% DSPC, 2% PEG-c-DMA, and 30% cationic lipid, where the cationic lipid can be 1,2-distearloxy-N,N-dimethylaminopropane (DSDMA), DODMA, DLin-DMA, or 1,2-dilinolenyloxy-3-dimethylaminopropane (DLenDMA), as described by Heyes et al.

[1102] In some embodiments, liposome formulations can comprise from about 25.0% cholesterol to about 40.0% cholesterol, from about 30.0% cholesterol to about 45.0% cholesterol, from about 35.0% cholesterol to about 50.0% cholesterol and/or from about 48.5% cholesterol to about 60% cholesterol. For example, formulations can comprise a percentage of cholesterol selected from the group consisting of 28.5%, 31.5%, 33.5%, 36.5%, 37.0%, 38.5%, 39.0% and 43.5%. In some embodiments, formulations can comprise from about 5.0% to about 10.0% DSPC and/or from about 7.0% to about 15.0% DSPC.

[1103] In one embodiment, pharmaceutical compositions can include liposomes that can be formed to deliver polynucleotides that can encode at least one polypeptide of interest. The polynucleotides can be encapsulated by the liposome and/or it can be contained in an aqueous core that can then be encapsulated by the liposome (see International Pub. Nos. WO2012031046, WO2012031043, WO2012030901 and WO2012006378 and US Patent Publication No. US20130189351, US20130195969 and US20130202684; the contents of each of which are herein incorporated by reference in their entirety).

[1104] In another embodiment, liposomes can be formulated for targeted delivery. As a non-limiting example, the liposome can be formulated for targeted delivery to the liver. The liposome used for targeted delivery can include, but is not limited to, the liposomes described in and methods of making liposomes described in US Patent Publication No. US20130195967, the contents of which are herein incorporated by reference in its entirety.

[1105] In another embodiment, the polynucleotide can be formulated in a cationic oil-in-water emulsion where the emulsion particle comprises an oil core and a cationic lipid that can interact with the polynucleotide anchoring the molecule to the emulsion particle (see International Pub. No. WO2012006380; herein incorporated by reference in its entirety).

[1106] In one embodiment, the polynucleotides can be formulated in a water-in-oil emulsion comprising a continuous hydrophobic phase in which the hydrophilic phase is dispersed. As a non-limiting example, the emulsion can be made by the methods described in International Publication No. WO201087791, the contents of which are herein incorporated by reference in its entirety.

[1107] In another embodiment, the lipid formulation can include at least cationic lipid, a lipid that can enhance transfection and a least one lipid that contains a hydrophilic head group linked to a lipid moiety (International Pub. No. WO2011076807 and U.S. Pub. No. 20110200582; the contents of each of which is herein incorporated by reference in their entirety). In another embodiment, the polynucleotides can be formulated in a lipid vesicle that can have crosslinks between functionalized lipid bilayers (see U.S. Pub. No. 20120177724, the contents of which is herein incorporated by reference in its entirety).

[1108] In one embodiment, the polynucleotides can be formulated in a liposome as described in International Patent Publication No. WO2013086526, the contents of which is herein incorporated by reference in its entirety. The polynucleotides can be encapsulated in a liposome using reverse pH gradients and/or optimized internal buffer compositions as described in International Patent Publication No. WO2013086526, the contents of which is herein incorporated by reference in its entirety.

[1109] In one embodiment, the polynucleotides pharmaceutical compositions can be formulated in liposomes such as, but not limited to, DiLa2 liposomes (Marina Biotech, Bothell, Wash.), SMARTICLES® (Marina Biotech, Bothell, Wash.), neutral DOPC (1,2-dioleoyl-sn-glycero-3-phosphocholine) based liposomes (e.g., siRNA delivery for ovarian cancer (Landen et al. Cancer Biology & Therapy 2006 5(12)1708-1713); herein incorporated by reference in its entirety) and hyaluronan-coated liposomes (Quiet Therapeutics, Israel).

[1110] In one embodiment, the cationic lipid can be a low molecular weight cationic lipid such as those described in US Patent Application No. 20130090372, the contents of which are herein incorporated by reference in its entirety.

[1111] In one embodiment, the polynucleotides can be formulated in a lipid vesicle that can have crosslinks between functionalized lipid bilayers.

[1112] In one embodiment, the polynucleotides can be formulated in a liposome comprising a cationic lipid. The liposome can have a molar ratio of nitrogen atoms in the cationic lipid to the phosphates in the RNA (N:P ratio) of between 1:1 and 20:1 as described in International Publication No. WO2013006825, herein incorporated by reference in its entirety. In another embodiment, the liposome can have a N:P ratio of greater than 20:1 or less than 1:1.

[1113] In one embodiment, the polynucleotides can be formulated in a lipid-polycation complex. The formation of the lipid-polycation complex can be accomplished by methods known in the art and/or as described in U.S. Pub. No. 20120178702, herein incorporated by reference in its entirety. As a non-limiting example, the polycation can include a cationic peptide or a polypeptide such as, but not limited to, polylysine, polyornithine and/or polyarginine and the cationic peptides described in International Pub. No. WO2012013326 or US Patent Pub. No. US20130142818; each of which is herein incorporated by reference in its entirety. In another embodiment, the polynucleotides can be formulated in a lipid-polycation complex that can further include a non-cationic lipid such as, but not limited to, cholesterol or dioleoyl phosphatidylethanolamine (DOPE).

[1114] In one embodiment, the polynucleotides can be formulated in an aminoalcohol lipidoid. Aminoalcohol lipidoids that can be used in the present disclosure can be prepared by the methods described in U.S. Pat. No. 8,450,298, herein incorporated by reference in its entirety.

[1115] The liposome formulation can be influenced by, but not limited to, the selection of the cationic lipid component, the degree of cationic lipid saturation, the nature of the PEGylation, ratio of all components and biophysical parameters such as size. In one example by Semple et al. (Semple et al. Nature Biotech. 2010 28:172-176; herein incorporated by reference in its entirety), the liposome formulation was composed of 57.1% cationic lipid, 7.1% dipalmitoylphosphatidylcholine, 34.3% cholesterol, and 1.4% PEG-c-DMA. As another example, changing the composition of the cationic lipid could more effectively deliver siRNA to various antigen presenting cells (Basha et al. Mol Ther. 2011 19:2186-2200; herein incorporated by reference in its entirety). In some embodiments, liposome formulations can comprise from about 35 to about 45% cationic lipid, from about 40% to about 50% cationic lipid, from about 50% to about 60% cationic lipid and/or from about 55% to about 65% cationic lipid. In some embodiments, the ratio of lipid to mRNA in liposomes can be from about 5:1 to about 20:1, from about 10:1 to about 25:1, from about 15:1 to about 30:1 and/or at least 30:1.

[1116] In some embodiments, the ratio of PEG in the lipid nanoparticle (LNP) formulations can be increased or decreased and/or the carbon chain length of the PEG lipid can be modified from C14 to C18 to alter the pharmacokinetics and/or biodistribution of the LNP formulations. As a non-limiting example, LNP formulations can contain from about 0.5% to about 3.0%, from about 1.0% to about 3.5%, from about 1.5% to about 4.0%, from about 2.0% to about 4.5%, from about 2.5% to about 5.0% and/or from about 3.0% to about 6.0% of the lipid molar ratio of PEG-c-DOMG (R-3-[(ω-methoxy-poly(ethyleneglycol)2000)carbamoyl)]-1,2-dimyristyloxypropyl-3-amine) (also referred to herein as PEG-DOMG) as compared to the cationic lipid, DSPC and cholesterol. In another embodiment the PEG-c-DOMG can be replaced with a PEG lipid such as, but not limited to, PEG-DSG (1,2-Distearoyl-sn-glycerol, methoxypolyethylene glycol), PEG-DMG (1,2-Dimyristoyl-sn-glycerol) and/or PEG-DPG (1,2-Dipalmitoyl-sn-glycerol, methoxypolyethylene glycol). The cationic lipid can be selected from any lipid known in the art such as, but not limited to, DLin-MC3-DMA, DLin-DMA, C12-200 and DLin-KC2-DMA.

[1117] In one embodiment, the polynucleotides can be formulated in a lipid nanoparticle such as those described in International Publication No. WO2012170930, the contents of which is herein incorporated by reference in its entirety.

[1118] In one embodiment, the formulation comprising the polynucleotide is a nanoparticle that can comprise at least one lipid. The lipid can be selected from, but is not limited to, DLin-DMA, DLin-K-DMA, 98N12-5, C12-200, DLin-MC3-DMA, DLin-KC2-DMA, DODMA, PLGA, PEG, PEG-DMG, PEGylated lipids and amino alcohol lipids. In another aspect, the lipid can be a cationic lipid such as, but not limited to, DLin-DMA, DLin-D-DMA, DLin-MC3-DMA, DLin-KC2-DMA, DODMA and amino alcohol lipids. The amino alcohol cationic lipid can be the lipids described in and/or made by the methods described in US Patent Publication No. US20130150625, herein incorporated by reference in its entirety. As a non-limiting example, the cationic lipid can be 2-amino-3-[(9Z,12Z)-octadeca-9,12-dien-1-yloxy]-2-{[(9Z,2Z)-octadeca-9,12-dien-1-yloxy]methyl}propan-1-ol (Compound 1 in US20130150625); 2-amino-3-[(9Z)-octadec-9-en-1-yloxy]-2-{[(9Z)-octadec-9-en-1-yloxy]methyl}propan-1-ol (Compound 2 in US20130150625); 2-amino-3-[(9Z,12Z)-octadeca-9,12-dien-1-yloxy]-2-[(octyloxy)methyl]propan-1-ol (Compound 3 in US20130150625); and 2-(dimethylamino)-3-[(9Z,12Z)-octadeca-9,12-dien-1-yloxy]-2-{[(9Z,12Z)-octadeca-9,12-dien-1-yloxy]methyl}propan-1-ol (Compound 4 in US20130150625); or any pharmaceutically acceptable salt or stereoisomer thereof.

[1119] Lipid nanoparticle formulations typically comprise a lipid, in particular, an ionizable cationic lipid, for example, 2,2-dilinoleyl-4-dimethylaminoethyl-[1,3]-dioxolane (DLin-KC2-DMA), dilinoleyl-methyl-4-dimethylaminobutyrate (DLin-MC3-DMA), or di((Z)-non-2-en-1-yl) 9-((4-(dimethylamino)butanoyl)oxy)heptadecanedioate (L319), and further comprise a neutral lipid, a sterol and a molecule capable of reducing particle aggregation, for example a PEG or PEG-modified lipid.

[1120] In one embodiment, the lipid nanoparticle formulation consists essentially of (i) at least one lipid selected from the group consisting of 2,2-dilinoleyl-4-dimethylaminoethyl-[1,3]-dioxolane (DLin-KC2-DMA), dilinoleyl-methyl-4-dimethylaminobutyrate (DLin-MC3-DMA), and di((Z)-non-2-en-1-yl) 9-((4-(dimethylamino)butanoyl)oxy)heptadecanedioate (L319); (ii) a neutral lipid selected from DSPC, DPPC, POPC, DOPE and SM; (iii) a sterol, e.g., cholesterol; and (iv) a PEG-lipid, e.g., PEG-DMG or PEG-cDMA, in a molar ratio of about 20-60% cationic lipid:5-25% neutral lipid:25-55% sterol; 0.5-15% PEG-lipid.

[1121] In one embodiment, the formulation includes from about 25% to about 75% on a molar basis of a cationic lipid selected from 2,2-dilinoleyl-4-dimethylaminoethyl-[1,3]-dioxolane (DLin-KC2-DMA), dilinoleyl-methyl-4-dimethylaminobutyrate (DLin-MC3-DMA), and di((Z)-non-2-en-1-yl) 9-((4-(dimethylamino)butanoyl)oxy)heptadecanedioate (L319), e.g., from about 35 to about 65%, from about 45 to about 65%, about 60%, about 57.5%, about 50% or about 40% on a molar basis.

[1122] In one embodiment, the formulation includes from about 0.5% to about 15% on a molar basis of the neutral lipid e.g., from about 3 to about 12%, from about 5 to about 10% or about 15%, about 10%, or about 7.5% on a molar basis. Exemplary neutral lipids include, but are not limited to, DSPC, POPC, DPPC, DOPE and SM. In one embodiment, the formulation includes from about 5% to about 50% on a molar basis of the sterol (e.g., about 15 to about 45%, about 20 to about 40%, about 40%, about 38.5%, about 35%, or about 31% on a molar basis. An exemplary sterol is cholesterol. In one embodiment, the formulation includes from about 0.5% to about 20% on a molar basis of the PEG or PEG-modified lipid (e.g., about 0.5 to about 10%, about 0.5 to about 5%, about 1.5%, about 0.5%, about 1.5%, about 3.5%, or about 5% on a molar basis. In one embodiment, the PEG or PEG modified lipid comprises a PEG molecule of an average molecular weight of 2,000 Da. In other embodiments, the PEG or PEG modified lipid comprises a PEG molecule of an average molecular weight of less than 2,000, for example around 1,500 Da, around 1,000 Da, or around 500 Da. Exemplary PEG-modified lipids include, but are not limited to, PEG-distearoyl glycerol (PEG-DMG) (also referred herein as PEG-C14 or C14-PEG), PEG-cDMA (further discussed in Reyes et al. J. Controlled Release, 107, 276-287 (2005) the contents of which are herein incorporated by reference in its entirety)

[1123] In one embodiment, the formulations of the disclosure include 25-75% of a cationic lipid selected from 2,2-dilinoleyl-4-dimethylaminoethyl-[1,3]-dioxolane (DLin-KC2-DMA), dilinoleyl-methyl-4-dimethylaminobutyrate (DLin-MC3-DMA), and di((Z)-non-2-en-1-yl) 9-((4-(dimethylamino)butanoyl)oxy)heptadecanedioate (L319), 0.5-15% of the neutral lipid, 5-50% of the sterol, and 0.5-20% of the PEG or PEG-modified lipid on a molar basis.

[1124] In one embodiment, the formulations of the disclosure include 35-65% of a cationic lipid selected from 2,2-dilinoleyl-4-dimethylaminoethyl-[1,3]-dioxolane (DLin-KC2-DMA), dilinoleyl-methyl-4-dimethylaminobutyrate (DLin-MC3-DMA), and di((Z)-non-2-en-1-yl) 9-((4-(dimethylamino)butanoyl)oxy)heptadecanedioate (L319), 3-12% of the neutral lipid, 15-45% of the sterol, and 0.5-10% of the PEG or PEG-modified lipid on a molar basis.

[1125] In one embodiment, the formulations of the disclosure include 45-65% of a cationic lipid selected from 2,2-dilinoleyl-4-dimethylaminoethyl-[1,3]-dioxolane (DLin-KC2-DMA), dilinoleyl-methyl-4-dimethylaminobutyrate (DLin-MC3-DMA), and di((Z)-non-2-en-1-yl) 9-((4-(dimethylamino)butanoyl)oxy)heptadecanedioate (L319), 5-10% of the neutral lipid, 25-40% of the sterol, and 0.5-10% of the PEG or PEG-modified lipid on a molar basis.

[1126] In one embodiment, the formulations of the disclosure include about 60% of a cationic lipid selected from 2,2-dilinoleyl-4-dimethylaminoethyl-[1,3]-dioxolane (DLin-KC2-DMA), dilinoleyl-methyl-4-dimethylaminobutyrate (DLin-MC3-DMA), and di((Z)-non-2-en-1-yl) 9-((4-(dimethylamino)butanoyl)oxy)heptadecanedioate (L319), about 7.5% of the neutral lipid, about 31% of the sterol, and about 1.5% of the PEG or PEG-modified lipid on a molar basis.

[1127] In one embodiment, the formulations of the disclosure include about 50% of a cationic lipid selected from 2,2-dilinoleyl-4-dimethylaminoethyl-[1,3]-dioxolane (DLin-KC2-DMA), dilinoleyl-methyl-4-dimethylaminobutyrate (DLin-MC3-DMA), and di((Z)-non-2-en-1-yl) 9-((4-(dimethylamino)butanoyl)oxy)heptadecanedioate (L319), about 10% of the neutral lipid, about 38.5% of the sterol, and about 1.5% of the PEG or PEG-modified lipid on a molar basis.

[1128] In one embodiment, the formulations of the disclosure include about 50% of a cationic lipid selected from 2,2-dilinoleyl-4-dimethylaminoethyl-[1,3]-dioxolane (DLin-KC2-DMA), dilinoleyl-methyl-4-dimethylaminobutyrate (DLin-MC3-DMA), and di((Z)-non-2-en-1-yl) 9-((4-(dimethylamino)butanoyl)oxy)heptadecanedioate (L319), about 10% of the neutral lipid, about 35% of the sterol, about 4.5% or about 5% of the PEG or PEG-modified lipid, and about 0.5% of the targeting lipid on a molar basis.

[1129] In one embodiment, the formulations of the disclosure include about 40% of a cationic lipid selected from 2,2-dilinoleyl-4-dimethylaminoethyl-[1,3]-dioxolane (DLin-KC2-DMA), dilinoleyl-methyl-4-dimethylaminobutyrate (DLin-MC3-DMA), and di((Z)-non-2-en-1-yl) 9-((4-(dimethylamino)butanoyl)oxy)heptadecanedioate (L319), about 15% of the neutral lipid, about 40% of the sterol, and about 5% of the PEG or PEG-modified lipid on a molar basis.

[1130] In one embodiment, the formulations of the disclosure include about 57.2% of a cationic lipid selected from 2,2-dilinoleyl-4-dimethylaminoethyl-[1,3]-dioxolane (DLin-KC2-DMA), dilinoleyl-methyl-4-dimethylaminobutyrate (DLin-MC3-DMA), and di((Z)-non-2-en-1-yl) 9-((4-(dimethylamino)butanoyl)oxy)heptadecanedioate (L319), about 7.1% of the neutral lipid, about 34.3% of the sterol, and about 1.4% of the PEG or PEG-modified lipid on a molar basis.

[1131] In one embodiment, the formulations of the disclosure include about 57.5% of a cationic lipid selected from the PEG lipid is PEG-cDMA (PEG-cDMA is further discussed in Reyes et al. (J. Controlled Release, 107, 276-287 (2005), the contents of which are herein incorporated by reference in its entirety), about 7.5% of the neutral lipid, about 31.5% of the sterol, and about 3.5% of the PEG or PEG-modified lipid on a molar basis.

[1132] In some embodiments, lipid nanoparticle formulation consists essentially of a lipid mixture in molar ratios of about 20-70% cationic lipid: 5-45% neutral lipid: 20-55% cholesterol: 0.5-15% PEG-modified lipid. In some embodiments, lipid nanoparticle formulation consists essentially of a lipid mixture in molar ratios of about 20-60% cationic lipid: 5-25% neutral lipid: 25-55% cholesterol: 0.5-15% PEG-modified lipid.

[1133] In particular embodiments, the molar lipid ratio is approximately 50/10/38.5/1.5 (mol % cationic lipid/neutral lipid, e.g., DSPC/Chol/PEG-modified lipid, e.g., PEG-DMG, PEG-DSG or PEG-DPG), 57.2/7.1134.3/1.4 (mol % cationic lipid/neutral lipid, e.g., DPPC/Chol/PEG-modified lipid, e.g., PEG-cDMA), 40/15/40/5 (mol % cationic lipid/neutral lipid, e.g., DSPC/Chol/PEG-modified lipid, e.g., PEG-DMG), 50/10/35/4.5/0.5 (mol % cationic lipid/neutral lipid, e.g., DSPC/Chol/PEG-modified lipid, e.g., PEG-DSG), 50/10/35/5 (cationic lipid/neutral lipid, e.g., DSPC/Chol/PEG-modified lipid, e.g., PEG-DMG), 40/10/40/10 (mol % cationic lipid/neutral lipid, e.g., DSPC/Chol/PEG-modified lipid, e.g., PEG-DMG or PEG-cDMA), 35/15/40/10 (mol % cationic lipid/neutral lipid, e.g., DSPC/Chol/PEG-modified lipid, e.g., PEG-DMG or PEG-cDMA) or 52/13/30/5 (mol % cationic lipid/neutral lipid, e.g., DSPC/Chol/PEG-modified lipid, e.g., PEG-DMG or PEG-cDMA).

[1134] Exemplary lipid nanoparticle compositions and methods of making same are described, for example, in Semple et al. (2010) Nat. Biotechnol. 28:172-176; Jayarama et al. (2012), Angew. Chem. Int. Ed., 51: 8529-8533; and Maier et al. (2013) Molecular Therapy 21, 1570-1578 (the contents of each of which are incorporated herein by reference in their entirety).

[1135] In one embodiment, the lipid nanoparticle formulations described herein can comprise a cationic lipid, a PEG lipid and a structural lipid and optionally comprise a non-cationic lipid. As a non-limiting example, the lipid nanoparticle can comprise about 40-60% of cationic lipid, about 5-15% of a non-cationic lipid, about 1-2% of a PEG lipid and about 30-50% of a structural lipid. As another non-limiting example, the lipid nanoparticle can comprise about 50% cationic lipid, about 10% non-cationic lipid, about 1.5% PEG lipid and about 38.5% structural lipid. As yet another non-limiting example, the lipid nanoparticle can comprise about 55% cationic lipid, about 10% non-cationic lipid, about 2.5% PEG lipid and about 32.5% structural lipid. In one embodiment, the cationic lipid can be any cationic lipid described herein such as, but not limited to, DLin-KC2-DMA, DLin-MC3-DMA and L319.

[1136] In one embodiment, the lipid nanoparticle formulations described herein can be 4 component lipid nanoparticles. The lipid nanoparticle can comprise a cationic lipid, a non-cationic lipid, a PEG lipid and a structural lipid. As a non-limiting example, the lipid nanoparticle can comprise about 40-60% of cationic lipid, about 5-15% of a non-cationic lipid, about 1-2% of a PEG lipid and about 30-50% of a structural lipid. As another non-limiting example, the lipid nanoparticle can comprise about 50% cationic lipid, about 10% non-cationic lipid, about 1.5% PEG lipid and about 38.5% structural lipid. As yet another non-limiting example, the lipid nanoparticle can comprise about 55% cationic lipid, about 10% non-cationic lipid, about 2.5% PEG lipid and about 32.5% structural lipid. In one embodiment, the cationic lipid can be any cationic lipid described herein such as, but not limited to, DLin-KC2-DMA, DLin-MC3-DMA and L319.

[1137] In one embodiment, the lipid nanoparticle formulations described herein can comprise a cationic lipid, a non-cationic lipid, a PEG lipid and a structural lipid. As a non-limiting example, the lipid nanoparticle comprise about 50% of the cationic lipid DLin-KC2-DMA, about 10% of the non-cationic lipid DSPC, about 1.5% of the PEG lipid PEG-DOMG and about 38.5% of the structural lipid cholesterol. As a non-limiting example, the lipid nanoparticle comprise about 50% of the cationic lipid DLin-MC3-DMA, about 10% of the non-cationic lipid DSPC, about 1.5% of the PEG lipid PEG-DOMG and about 38.5% of the structural lipid cholesterol. As a non-limiting example, the lipid nanoparticle comprise about 50% of the cationic lipid DLin-MC3-DMA, about 10% of the non-cationic lipid DSPC, about 1.5% of the PEG lipid PEG-DMG and about 38.5% of the structural lipid cholesterol. As yet another non-limiting example, the lipid nanoparticle comprise about 55% of the cationic lipid L319, about 10% of the non-cationic lipid DSPC, about 2.5% of the PEG lipid PEG-DMG and about 32.5% of the structural lipid cholesterol.

[1138] In one embodiment, the cationic lipid can be selected from, but not limited to, a cationic lipid described in International Publication Nos. WO2012040184, WO2011153120, WO2011149733, WO2011090965, WO2011043913, WO2011022460, WO2012061259, WO2012054365, WO2012044638, WO2010080724, WO201021865, WO2008103276, WO2013086373 and WO2013086354, U.S. Pat. Nos. 7,893,302, 7,404,969, 8,283,333, and 8,466,122 and US Patent Publication No. US20100036115, US20120202871, US20130064894, US20130129785, US20130150625, US20130178541 and US20130225836; the contents of each of which are herein incorporated by reference in their entirety. In another embodiment, the cationic lipid can be selected from, but not limited to, formula A described in International Publication Nos. WO2012040184, WO2011153120, WO2011149733, WO2011090965, WO2011043913, WO2011022460, WO2012061259, WO2012054365, WO2012044638 and WO2013116126 or US Patent Publication No. US20130178541 and US20130225836; the contents of each of which is herein incorporated by reference in their entirety. In yet another embodiment, the cationic lipid can be selected from, but not limited to, formula CLI-CLXXIX of International Publication No. WO2008103276, formula CLI-CLXXIX of U.S. Pat. No. 7,893,302, formula CLI-CLXXXXII of U.S. Pat. No. 7,404,969 and formula I-VI of US Patent Publication No. US20100036115, formula I of US Patent Publication No US20130123338; each of which is herein incorporated by reference in their entirety. As a non-limiting example, the cationic lipid can be selected from (20Z,23Z)—N,N-dimethylnonacosa-20,23-dien-10-amine, (17Z,20Z)—N,N-dimemylhexacosa-17,20-dien-9-amine, (1Z,19Z)—N5N-dimethylpentacosa-1 6, 19-dien-8-amine, (13Z,16Z)—N,N-dimethyldocosa-13,16-dien-5-amine, (12Z,15Z)—N,N-dimethylhenicosa-12,15-dien-4-amine, (14Z,17Z)—N,N-dimethyltricosa-14,17-dien-6-amine, (15Z,18Z)—N,N-dimethyltetracosa-15,18-dien-7-amine, (18Z,21Z)—N,N-dimethylheptacosa-18,21-dien-10-amine, (15Z,18Z)—N,N-dimethyltetracosa-15,18-dien-5-amine, (14Z,17Z)—N,N-dimethyltricosa-14,17-dien-4-amine, (19Z,22Z)—N,N-dimeihyloctacosa-19,22-dien-9-amine, (18Z,21 Z)—N,N-dimethylheptacosa-18,21-dien-8-amine, (17Z,20Z)—N,N-dimethylhexacosa-17,20-dien-7-amine, (16Z,19Z)—N,N-dimethylpentacosa-16,19-dien-6-amine, (22Z,25Z)—N,N-dimethylhentriaconta-22,25-dien-10-amine, (21 Z,24Z)—N,N-dimethyltriaconta-21,24-dien-9-amine, (18Z)—N,N-dimetylheptacos-18-en-10-amine, (17Z)—N,N-dimethylhexacos-17-en-9-amine, (19Z,22Z)—N,N-dimethyloctacosa-19,22-dien-7-amine, N,N-dimethylheptacosan-10-amine, (20Z,23Z)—N-ethyl-N-methylnonacosa-20,23-dien-10-amine, 1-[(11Z,14Z)-1-nonylicosa-11,14-dien-1-yl] pyrrolidine, (20Z)—N,N-dimethylheptacos-20-en-10-amine, (15Z)—N,N-dimethyleptacos-15-en-10-amine, (14Z)—N,N-dimethylnonacos-14-en-10-amine, (17Z)—N,N-dimethylnonacos-17-en-10-amine, (24Z)—N,N-dimethyltritriacont-24-en-10-amine, (20Z)—N,N-dimethylnonacos-20-en-10-amine, (22Z)—N,N-dimethylhentriacont-22-en-10-amine, (16Z)—N,N-dimethylpentacos-16-en-8-amine, (12Z,15Z)—N,N-dimethyl-2-nonylhenicosa-12,15-dien-1-amine, (13Z,16Z)—N,N-dimethyl-3-nonyldocosa-13,16-dien-1-amine, N,N-dimethyl-1-[(1S,2R)-2-octylcyclopropyl]eptadecan-8-amine, 1-[(1S,2R)-2-hexylcyclopropyl]-N,N-dimethylnonadecan-10-amine, N,N-dimethyl-1-[(1S,2R)-2-octylcyclopropyl]nonadecan-10-amine, N,N-dimethyl-21-[(1S,2R)-2-octylcyclopropyl]henicosan-10-amine,N,N-dimethyl-1-[(1 S,2S)-2-{[(1R,2R)-2-pentylcyclopropyl]methyl}cyclopropyl]nonadecan-10-amine,N,N-dimethyl-1-[(1 S,2R)-2-octylcyclopropyl]hexadecan-8-amine, N,N-dimethyl-[(1R,2 S)-2-undecyIcyclopropyl]tetradecan-5-amine, N,N-dimethyl-3-{7-[(1 S,2R)-2-octylcyclopropyl]heptyl}dodecan-1-amine, 1-[(1R,2S)-2-heptylcyclopropyl]-N,N-dimethyloctadecan-9-amine, 1-[(1 S,2R)-2-decylcyclopropyl]-N,N-dimethylpentadecan-6-amine, N,N-dimethyl-1-[(1 S,2R)-2-octylcyclopropyl]pentadecan-8-amine, R—N,N-dimethyl-1-[(9Z,12Z)-octadeca-9,12-dien-1-yloxy]-3-(octyloxy)propan-2-amine, S—N,N-dimethyl-1-[(9Z,12Z)-octadeca-9,12-dien-1-yloxy]-3-(octyloxy)propan-2-amine, 1-{2-[(9Z,12Z)-octadeca-9,12-dien-1-yloxy]-1-[(octyloxy)methyl]ethyl}pyrrolidine, (2S)—N,N-dimethyl-1-[(9Z,12Z)-octadeca-9,12-dien-1-yloxy]-3-[(5Z)-oct-5-en-1-yloxy]propan-2-amine, 1-{2-[(9Z,12Z)-octadeca-9,12-dien-1-yloxy]-1-[(octyloxy)methyl]ethyl}azetidine, (2S)-1-(hexyloxy)-N,N-dimethyl-3-[(9Z,12Z)-octadeca-9,12-dien-1-yloxy]propan-2-amine, (2S)-1-(heptyloxy)-N,N-dimethyl-3-[(9Z,12Z)-octadeca-9,12-dien-1-yloxy]propan-2-amine, N,N-dimethyl-1-(nonyloxy)-3-[(9Z,12Z)-octadeca-9,12-dien-1-yloxy]propan-2-amine, N,N-dimethyl-1-[(9Z)-octadec-9-en-1-yloxy]-3-(octyloxy)propan-2-amine; (2S)—N,N-dimethyl-1-[(6Z,9Z,12Z)-octadeca-6,9,12-trien-1-yloxy]-3-(octyloxy)propan-2-amine, (2S)-1-[(11Z,14Z)-icosa-11,14-dien-1-yloxy]-N,N-dimethyl-3-(pentyloxy)propan-2-amine, (2S)-1-(hexyloxy)-3-[(11Z,14Z)-icosa-11,14-dien-1-yloxy]-N,N-dimethylpropan-2-amine, 1-[(11Z,14Z)-icosa-11,14-dien-1-yloxy]-N,N-dimethyl-3-(octyloxy)propan-2-amine, 1-[(13Z,16Z)-docosa-13,16-dien-1-yloxy]-N,N-dimethyl-3-(octyloxy)propan-2-amine, (2S)-1-[(13Z,16Z)-docosa-13,16-dien-1-yloxy]-3-(hexyloxy)-N,N-dimethylpropan-2-amine, (2 S)-1-[(13Z)-docos-13-en-1-yloxy]-3-(hexyloxy)-N,N-dimethylpropan-2-amine, 1-[(13Z)-docos-13-en-1-yloxy]-N,N-dimethyl-3-(octyloxy)propan-2-amine, 1-[(9Z)-hexadec-9-en-1-yloxy]-N,N-dimethyl-3-(octyloxy)propan-2-amine, (2R)—N,N-dimethyl-H(1-metoyloctyl)oxy]-3-[(9Z,12Z)-octadeca-9,12-dien-1-yloxy]propan-2-amine, (2R)-1-[(3,7-dimethyloctyl)oxy]-N,N-dimethyl-3-[(9Z,12Z)-octadeca-9,12-dien-1-yloxy]propan-2-amine, N,N-dimethyl-1-(octyloxy)-3-({8-[(1S,2S)-2-{[(1R,2R)-2-pentylcyclopropyl]methyl}cyclopropyl]octyl}oxy)propan-2-amine, N,N-dimethyl-1-{[8-(2-oclylcyclopropyl)octyl]oxy}-3-(octyloxy)propan-2-amine and (11E,20Z,23Z)—N,N-dimethylnonacosa-11,20,2-trien-10-amine or a pharmaceutically acceptable salt or stereoisomer thereof.

[1139] In one embodiment, the lipid can be a cleavable lipid such as those described in International Publication No. WO2012170889, herein incorporated by reference in its entirety.

[1140] In another embodiment, the lipid can be a cationic lipid such as, but not limited to, Formula (I) of U.S. Patent Application No. US20130064894, the contents of which are herein incorporated by reference in its entirety.

[1141] In one embodiment, the cationic lipid can be synthesized by methods known in the art and/or as described in International Publication Nos. WO2012040184, WO2011153120, WO2011149733, WO2011090965, WO2011043913, WO2011022460, WO2012061259, WO2012054365, WO2012044638, WO2010080724, WO201021865, WO2013086373 and WO2013086354; the contents of each of which are herein incorporated by reference in their entirety.

[1142] In another embodiment, the cationic lipid can be a trialkyl cationic lipid. Non-limiting examples of trialkyl cationic lipids and methods of making and using the trialkyl cationic lipids are described in International Patent Publication No. WO2013126803, the contents of which are herein incorporated by reference in its entirety.

[1143] In one embodiment, the LNP formulations of the polynucleotides can contain PEG-c-DOMG at 3% lipid molar ratio. In another embodiment, the LNP formulations of polynucleotides can contain PEG-c-DOMG at 1.5% lipid molar ratio.

[1144] In one embodiment, the pharmaceutical compositions of the polynucleotides can include at least one of the PEGylated lipids described in International Publication No. WO2012099755, the contents of which is herein incorporated by reference in its entirety.

[1145] In one embodiment, the LNP formulation can contain PEG-DMG 2000 (1,2-dimyristoyl-sn-glycero-3-phophoethanolamine-N-[methoxy(polyethylene glycol)-2000). In one embodiment, the LNP formulation can contain PEG-DMG 2000, a cationic lipid known in the art and at least one other component. In another embodiment, the LNP formulation can contain PEG-DMG 2000, a cationic lipid known in the art, DSPC and cholesterol. As a non-limiting example, the LNP formulation can contain PEG-DMG 2000, DLin-DMA, DSPC and cholesterol. As another non-limiting example the LNP formulation can contain PEG-DMG 2000, DLin-DMA, DSPC and cholesterol in a molar ratio of 2:40:10:48 (see, e.g., Geall et al., Nonviral delivery of self-amplifying RNA vaccines, PNAS 2012; PMID: 22908294; herein incorporated by reference in its entirety).

[1146] In one embodiment, the LNP formulation can be formulated by the methods described in International Publication Nos. WO2011127255 or WO2008103276, the contents of each of which is herein incorporated by reference in their entirety. As a non-limiting example, the polynucleotides described herein can be encapsulated in LNP formulations as described in WO2011127255 and/or WO2008103276; each of which is herein incorporated by reference in their entirety.

[1147] In one embodiment, the polynucleotides described herein can be formulated in a nanoparticle to be delivered by a parenteral route as described in U.S. Pub. No. US20120207845; the contents of which are herein incorporated by reference in its entirety.

[1148] In one embodiment, the Polynucleotides can be formulated in a lipid nanoparticle made by the methods described in US Patent Publication No US20130156845 or International Publication No WO2013093648 or WO2012024526, each of which is herein incorporated by reference in its entirety.

[1149] The lipid nanoparticles described herein can be made in a sterile environment by the system and/or methods described in US Patent Publication No. US20130164400, herein incorporated by reference in its entirety.

[1150] In one embodiment, the LNP formulation can be formulated in a nanoparticle such as a nucleic acid-lipid particle described in U.S. Pat. No. 8,492,359, the contents of which are herein incorporated by reference in its entirety. As a non-limiting example, the lipid particle can comprise one or more active agents or therapeutic agents; one or more cationic lipids comprising from about 50 mol % to about 85 mol % of the total lipid present in the particle; one or more non-cationic lipids comprising from about 13 mol % to about 49.5 mol % of the total lipid present in the particle; and one or more conjugated lipids that inhibit aggregation of particles comprising from about 0.5 mol % to about 2 mol % of the total lipid present in the particle. The nucleic acid in the nanoparticle can be the polynucleotides described herein and/or are known in the art.

[1151] In one embodiment, the LNP formulation can be formulated by the methods described in International Publication Nos. WO2011127255 or WO2008103276, the contents of each of which are herein incorporated by reference in their entirety. As a non-limiting example, modified RNA described herein can be encapsulated in LNP formulations as described in WO2011127255 and/or WO2008103276; the contents of each of which are herein incorporated by reference in their entirety.

[1152] In one embodiment, LNP formulations described herein can comprise a polycationic composition. As a non-limiting example, the polycationic composition can be selected from formula 1-60 of US Patent Publication No. US20050222064; the content of which is herein incorporated by reference in its entirety. In another embodiment, the LNP formulations comprising a polycationic composition can be used for the delivery of the modified RNA described herein in vivo and/or in vitro.

[1153] In one embodiment, the LNP formulations described herein can additionally comprise a permeability enhancer molecule. Non-limiting permeability enhancer molecules are described in US Patent Publication No. US20050222064; the content of which is herein incorporated by reference in its entirety.

[1154] In one embodiment, the polynucleotide pharmaceutical compositions can be formulated in liposomes such as, but not limited to, DiLa2 liposomes (Marina Biotech, Bothell, Wash.), SMARTICLES® (Marina Biotech, Bothell, Wash.), neutral DOPC (1,2-dioleoyl-sn-glycero-3-phosphocholine) based liposomes (e.g., siRNA delivery for ovarian cancer (Landen et al. Cancer Biology & Therapy 2006 5(12)1708-1713); herein incorporated by reference in its entirety) and hyaluronan-coated liposomes (Quiet Therapeutics, Israel).

[1155] In one embodiment, the Polynucleotides can be formulated in a lyophilized gel-phase liposomal composition as described in US Publication No. US2012060293, herein incorporated by reference in its entirety.

[1156] The nanoparticle formulations can comprise a phosphate conjugate. The phosphate conjugate can increase in vivo circulation times and/or increase the targeted delivery of the nanoparticle. Phosphate conjugates for use with the present disclosure can be made by the methods described in International Application No. WO2013033438 or US Patent Publication No. US20130196948, the contents of each of which are herein incorporated by reference in its entirety. As a non-limiting example, the phosphate conjugates can include a compound of any one of the formulas described in International Application No. WO2013033438, herein incorporated by reference in its entirety.

[1157] The nanoparticle formulation can comprise a polymer conjugate. The polymer conjugate can be a water soluble conjugate. The polymer conjugate can have a structure as described in U.S. Patent Application No. 20130059360, the contents of which are herein incorporated by reference in its entirety. In one aspect, polymer conjugates with the polynucleotides of the present disclosure can be made using the methods and/or segmented polymeric reagents described in U.S. Patent Application No. 20130072709, herein incorporated by reference in its entirety. In another aspect, the polymer conjugate can have pendant side groups comprising ring moieties such as, but not limited to, the polymer conjugates described in US Patent Publication No. US20130196948, the contents of which is herein incorporated by reference in its entirety.

[1158] The nanoparticle formulations can comprise a conjugate to enhance the delivery of nanoparticles of the present disclosure in a subject. Further, the conjugate can inhibit phagocytic clearance of the nanoparticles in a subject. In one aspect, the conjugate can be a “self” peptide designed from the human membrane protein CD47 (e.g., the “self” particles described by Rodriguez et al (Science 2013 339, 971-975), herein incorporated by reference in its entirety). As shown by Rodriguez et al. the self peptides delayed macrophage-mediated clearance of nanoparticles which enhanced delivery of the nanoparticles. In another aspect, the conjugate can be the membrane protein CD47 (e.g., see Rodriguez et al. Science 2013 339, 971-975, herein incorporated by reference in its entirety). Rodriguez et al. showed that, similarly to “self” peptides, CD47 can increase the circulating particle ratio in a subject as compared to scrambled peptides and PEG coated nanoparticles.

[1159] In one embodiment, the Polynucleotides of the present disclosure are formulated in nanoparticles that comprise a conjugate to enhance the delivery of the nanoparticles of the present disclosure in a subject. The conjugate can be the CD47 membrane or the conjugate can be derived from the CD47 membrane protein, such as the “self” peptide described previously. In another aspect the nanoparticle can comprise PEG and a conjugate of CD47 or a derivative thereof. In yet another aspect, the nanoparticle can comprise both the “self” peptide described above and the membrane protein CD47.

[1160] In another aspect, a “self” peptide and/or CD47 protein can be conjugated to a virus-like particle or pseudovirion, as described herein for delivery of the Polynucleotides of the present disclosure.

[1161] In another embodiment, pharmaceutical compositions comprise the polynucleotides of the present disclosure and a conjugate that can have a degradable linkage. Non-limiting examples of conjugates include an aromatic moiety comprising an ionizable hydrogen atom, a spacer moiety, and a water-soluble polymer. As a non-limiting example, pharmaceutical compositions comprising a conjugate with a degradable linkage and methods for delivering such pharmaceutical compositions are described in US Patent Publication No. US20130184443, the contents of which are herein incorporated by reference in its entirety.

[1162] The nanoparticle formulations can be a carbohydrate nanoparticle comprising a carbohydrate carrier and a polynucleotide. As a non-limiting example, the carbohydrate carrier can include, but is not limited to, an anhydride-modified phytoglycogen or glycogen-type material, phytoglycogen octenyl succinate, phytoglycogen beta-dextrin, anhydride-modified phytoglycogen beta-dextrin. (See, e.g., International Publication No. WO2012109121; the contents of which are herein incorporated by reference in its entirety).

[1163] Nanoparticle formulations of the present disclosure can be coated with a surfactant or polymer in order to improve the delivery of the particle. In one embodiment, the nanoparticle can be coated with a hydrophilic coating such as, but not limited to, PEG coatings and/or coatings that have a neutral surface charge. The hydrophilic coatings can help to deliver nanoparticles with larger payloads such as, but not limited to, Polynucleotides within the central nervous system. As a non-limiting example nanoparticles comprising a hydrophilic coating and methods of making such nanoparticles are described in US Patent Publication No. US20130183244, the contents of which are herein incorporated by reference in its entirety.

[1164] In one embodiment, the lipid nanoparticles of the present disclosure can be hydrophilic polymer particles. Non-limiting examples of hydrophilic polymer particles and methods of making hydrophilic polymer particles are described in US Patent Publication No. US20130210991, the contents of which are herein incorporated by reference in its entirety.

[1165] In another embodiment, the lipid nanoparticles of the present disclosure can be hydrophobic polymer particles.

[1166] Lipid nanoparticle formulations can be improved by replacing the cationic lipid with a biodegradable cationic lipid that is known as a rapidly eliminated lipid nanoparticle (reLNP). Ionizable cationic lipids, such as, but not limited to, DLinDMA, DLin-KC2-DMA, and DLin-MC3-DMA, have been shown to accumulate in plasma and tissues over time and can be a potential source of toxicity. The rapid metabolism of the rapidly eliminated lipids can improve the tolerability and therapeutic index of the lipid nanoparticles by an order of magnitude from a 1 mg/kg dose to a 10 mg/kg dose in rat. Inclusion of an enzymatically degraded ester linkage can improve the degradation and metabolism profile of the cationic component, while still maintaining the activity of the reLNP formulation. The ester linkage can be internally located within the lipid chain or it can be terminally located at the terminal end of the lipid chain. The internal ester linkage can replace any carbon in the lipid chain.

[1167] In one embodiment, the internal ester linkage can be located on either side of the saturated carbon.

[1168] Lipid nanoparticles can be engineered to alter the surface properties of particles so the lipid nanoparticles can penetrate the mucosal barrier. Mucus is located on mucosal tissue such as, but not limited to, oral (e.g., the buccal and esophageal membranes and tonsil tissue), ophthalmic, gastrointestinal (e.g., stomach, small intestine, large intestine, colon, rectum), nasal, respiratory (e.g., nasal, pharyngeal, tracheal and bronchial membranes), genital (e.g., vaginal, cervical and urethral membranes). Nanoparticles larger than 10-200 nm can be used for higher drug encapsulation efficiency and the ability to provide the sustained delivery of a wide array of drugs have been thought to be too large to rapidly diffuse through mucosal barriers. Mucus is continuously secreted, shed, discarded or digested and recycled so most of the trapped particles can be removed from the mucosal tissue within seconds or within a few hours. Large polymeric nanoparticles (200 nm-500 nm in diameter) that have been coated densely with a low molecular weight polyethylene glycol (PEG) diffused through mucus only 4 to 6-fold lower than the same particles diffusing in water (Lai et al. PNAS 2007 104(5):1482-487; Lai et al. Adv Drug Deliv Rev. 2009 61(2): 158-171; each of which is herein incorporated by reference in their entirety). The transport of nanoparticles can be determined using rates of permeation and/or fluorescent microscopy techniques including, but not limited to, fluorescence recovery after photobleaching (FRAP) and high resolution multiple particle tracking (MPT). As a non-limiting example, compositions that can penetrate a mucosal barrier can be made as described in U.S. Pat. No. 8,241,670 or International Patent Publication No. WO2013110028, the contents of each of which are herein incorporated by reference in its entirety.

[1169] The lipid nanoparticle engineered to penetrate mucus can comprise a polymeric material (i.e., a polymeric core) and/or a polymer-vitamin conjugate and/or a tri-block co-polymer. The polymeric material can include, but is not limited to, polyamines, polyethers, polyamides, polyesters, polycarbamates, polyureas, polycarbonates, poly(styrenes), polyimides, polysulfones, polyurethanes, polyacetylenes, polyethylenes, polyethyeneimines, polyisocyanates, polyacrylates, polymethacrylates, polyacrylonitriles, and polyarylates. The polymeric material can be biodegradable and/or biocompatible. Non-limiting examples of biocompatible polymers are described in International Patent Publication No. WO2013116804, the contents of which are herein incorporated by reference in its entirety. The polymeric material can additionally be irradiated. As a non-limiting example, the polymeric material can be gamma irradiated (See e.g., International App. No. WO201282165, herein incorporated by reference in its entirety). Non-limiting examples of specific polymers include poly(caprolactone) (PCL), ethylene vinyl acetate polymer (EVA), poly(lactic acid) (PLA), poly(L-lactic acid) (PLLA), poly(glycolic acid) (PGA), poly(lactic acid-co-glycolic acid) (PLGA), poly(L-lactic acid-co-glycolic acid) (PLLGA), poly(D,L-lactide) (PDLA), poly(L-lactide) (PLLA), poly(D,L-lactide-co-caprolactone), poly(D,L-lactide-co-caprolactone-co-glycolide), poly(D,L-lactide-co-PEO-co-D,L-lactide), poly(D,L-lactide-co-PPO-co-D,L-lactide), polyalkyl cyanoacralate, polyurethane, poly-L-lysine (PLL), hydroxypropyl methacrylate (HPMA), polyethyleneglycol, poly-L-glutamic acid, poly(hydroxy acids), polyanhydrides, polyorthoesters, poly(ester amides), polyamides, poly(ester ethers), polycarbonates, polyalkylenes such as polyethylene and polypropylene, polyalkylene glycols such as poly(ethylene glycol) (PEG), polyalkylene oxides (PEO), polyalkylene terephthalates such as poly(ethylene terephthalate), polyvinyl alcohols (PVA), polyvinyl ethers, polyvinyl esters such as poly(vinyl acetate), polyvinyl halides such as poly(vinyl chloride) (PVC), polyvinylpyrrolidone, polysiloxanes, polystyrene (PS), polyurethanes, derivatized celluloses such as alkyl celluloses, hydroxyalkyl celluloses, cellulose ethers, cellulose esters, nitro celluloses, hydroxypropylcellulose, carboxymethylcellulose, polymers of acrylic acids, such as poly(methyl(meth)acrylate) (PMMA), poly(ethyl(meth)acrylate), poly(butyl(meth)acrylate), poly(isobutyl(meth)acrylate), poly(hexyl(meth)acrylate), poly(isodecyl(meth)acrylate), poly(lauryl(meth)acrylate), poly(phenyl(meth)acrylate), poly(methyl acrylate), poly(isopropyl acrylate), poly(isobutyl acrylate), poly(octadecyl acrylate) and copolymers and mixtures thereof, polydioxanone and its copolymers, polyhydroxyalkanoates, polypropylene fumarate, polyoxymethylene, poloxamers, poly(ortho)esters, poly(butyric acid), poly(valeric acid), poly(lactide-co-caprolactone), PEG-PLGA-PEG and trimethylene carbonate, polyvinylpyrrolidone. The lipid nanoparticle can be coated or associated with a co-polymer such as, but not limited to, a block co-polymer (such as a branched polyether-polyamide block copolymer described in International Publication No. WO2013012476, herein incorporated by reference in its entirety), and (poly(ethylene glycol))-(poly(propylene oxide))-(poly(ethylene glycol)) triblock copolymer (see, e.g., US Publication 20120121718 and US Publication 20100003337 and U.S. Pat. No. 8,263,665; each of which is herein incorporated by reference in their entirety). The co-polymer can be a polymer that is generally regarded as safe (GRAS) and the formation of the lipid nanoparticle can be in such a way that no new chemical entities are created. For example, the lipid nanoparticle can comprise poloxamers coating PLGA nanoparticles without forming new chemical entities that are still able to rapidly penetrate human mucus (Yang et al. Angew. Chem. Int. Ed. 2011 50:2597-2600; the contents of which are herein incorporated by reference in its entirety). A non-limiting scalable method to produce nanoparticles that can penetrate human mucus is described by Xu et al. (See, e.g., J Control Release 2013, 170(2):279-86; the contents of which are herein incorporated by reference in its entirety).

[1170] The vitamin of the polymer-vitamin conjugate can be vitamin E. The vitamin portion of the conjugate can be substituted with other suitable components such as, but not limited to, vitamin A, vitamin E, other vitamins, cholesterol, a hydrophobic moiety, or a hydrophobic component of other surfactants (e.g., sterol chains, fatty acids, hydrocarbon chains and alkylene oxide chains).

[1171] The lipid nanoparticle engineered to penetrate mucus can include surface altering agents such as, but not limited to, polynucleotides, anionic proteins (e.g., bovine serum albumin), surfactants (e.g., cationic surfactants such as for example dimethyldioctadecyl-ammonium bromide), sugars or sugar derivatives (e.g., cyclodextrin), nucleic acids, polymers (e.g., heparin, polyethylene glycol and poloxamer), mucolytic agents (e.g., N-acetylcysteine, mugwort, bromelain, papain, clerodendrum, acetylcysteine, bromhexine, carbocisteine, eprazinone, mesna, ambroxol, sobrerol, domiodol, letosteine, stepronin, tiopronin, gelsolin, thymosin 34 dornase alfa, neltenexine, erdosteine) and various DNases including rhDNase. The surface altering agent can be embedded or enmeshed in the particle's surface or disposed (e.g., by coating, adsorption, covalent linkage, or other process) on the surface of the lipid nanoparticle. (see e.g., US Publication 20100215580 and US Publication 20080166414 and US20130164343; the contents of each of which is herein incorporated by reference in their entirety).

[1172] In one embodiment, the mucus penetrating lipid nanoparticles can comprise at least one polynucleotide described herein. The polynucleotide can be encapsulated in the lipid nanoparticle and/or disposed on the surface of the particle. The polynucleotide can be covalently coupled to the lipid nanoparticle. Formulations of mucus penetrating lipid nanoparticles can comprise a plurality of nanoparticles. Further, the formulations can contain particles that can interact with the mucus and alter the structural and/or adhesive properties of the surrounding mucus to decrease mucoadhesion that can increase the delivery of the mucus penetrating lipid nanoparticles to the mucosal tissue.

[1173] In another embodiment, the mucus penetrating lipid nanoparticles can be a hypotonic formulation comprising a mucosal penetration enhancing coating. The formulation can be hypotonic for the epithelium to which it is being delivered. Non-limiting examples of hypotonic formulations can be found in International Patent Publication No. WO2013110028, the contents of which are herein incorporated by reference in its entirety.

[1174] In one embodiment, in order to enhance the delivery through the mucosal barrier the polynucleotide formulation can comprise or be a hypotonic solution. Hypotonic solutions were found to increase the rate at which mucoinert particles such as, but not limited to, mucus-penetrating particles, were able to reach the vaginal epithelial surface (see, e.g., Ensign et al. Biomaterials 2013 34(28):6922-9; the contents of which is herein incorporated by reference in its entirety).

[1175] In one embodiment, the polynucleotide is formulated as a lipoplex, such as, without limitation, the ATUPLEX™ system, the DACC system, the DBTC system and other siRNA-lipoplex technology from Silence Therapeutics (London, United Kingdom), STEMFECT™ from STEMGENT® (Cambridge, Mass.), and polyethylenimine (PEI) or protamine-based targeted and non-targeted delivery of nucleic acids (Aleku et al. Cancer Res. 2008 68:9788-9798; Strumberg et al. Int J Clin Pharmacol Ther 2012 50:76-78; Santel et al., Gene Ther 2006 13:1222-1234; Santel et al., Gene Ther 2006 13:1360-1370; Gutbier et al., Pulm Pharmacol. Ther. 2010 23:334-344; Kaufmann et al. Microvasc Res 2010 80:286-293Weide et al. J Immunother. 2009 32:498-507; Weide et al. J Immunother. 2008 31:180-188; Pascolo Expert Opin. Biol. Ther. 4:1285-1294; Fotin-Mleczek et al., 2011 J. Immunother. 34:1-15; Song et al., Nature Biotechnol. 2005, 23:709-717; Peer et al., Proc Natl Acad Sci USA. 2007 6; 104:4095-4100; deFougerolles Hum Gene Ther. 2008 19:125-132; all of which are incorporated herein by reference in its entirety).

[1176] In one embodiment such formulations can also be constructed or compositions altered such that they passively or actively are directed to different cell types in vivo, including but not limited to hepatocytes, immune cells, tumor cells, endothelial cells, antigen presenting cells, and leukocytes (Akinc et al. Mol Ther. 2010 18:1357-1364; Song et al., Nat Biotechnol. 2005 23:709-717; Judge et al., J Clin Invest. 2009 119:661-673; Kaufmann et al., Microvasc Res 2010 80:286-293; Santel et al., Gene Ther 2006 13:1222-1234; Santel et al., Gene Ther 2006 13:1360-1370; Gutbier et al., Pulm Pharmacol. Ther. 2010 23:334-344; Basha et al., Mol. Ther. 2011 19:2186-2200; Fenske and Cullis, Expert Opin Drug Deliv. 2008 5:25-44; Peer et al., Science. 2008 319:627-630; Peer and Lieberman, Gene Ther. 2011 18:1127-1133; all of which are incorporated herein by reference in its entirety). One example of passive targeting of formulations to liver cells includes the DLin-DMA, DLin-KC2-DMA and DLin-MC3-DMA-based lipid nanoparticle formulations that have been shown to bind to apolipoprotein E and promote binding and uptake of these formulations into hepatocytes in vivo (Akinc et al. Mol Ther. 2010 18:1357-1364; herein incorporated by reference in its entirety). Formulations can also be selectively targeted through expression of different ligands on their surface as exemplified by, but not limited by, folate, transferrin, N-acetylgalactosamine (GalNAc), and antibody targeted approaches (Kolhatkar et al., Curr Drug Discov Technol. 2011 8:197-206; Musacchio and Torchilin, Front Biosci. 2011 16:1388-1412; Yu et al., Mol Membr Biol. 2010 27:286-298; Patil et al., Crit Rev Ther Drug Carrier Syst. 2008 25:1-61; Benoit et al., Biomacromolecules. 2011 12:2708-2714; Zhao et al., Expert Opin Drug Deliv. 2008 5:309-319; Akinc et al., Mol Ther. 2010 18:1357-1364; Srinivasan et al., Methods Mol Biol. 2012 820:105-116; Ben-Arie et al., Methods Mol Biol. 2012 757:497-507; Peer 2010 J Control Release. 20:63-68; Peer et al., Proc Natl Acad Sci USA. 2007 104:4095-4100; Kim et al., Methods Mol Biol. 2011 721:339-353; Subramanya et al., Mol Ther. 2010 18:2028-2037; Song et al., Nat Biotechnol. 2005 23:709-717; Peer et al., Science. 2008 319:627-630; Peer and Lieberman, Gene Ther. 2011 18:1127-1133; all of which are incorporated herein by reference in its entirety).

[1177] In one embodiment, the polynucleotide is formulated as a solid lipid nanoparticle. A solid lipid nanoparticle (SLN) can be spherical with an average diameter between 10 to 1000 nm. SLN possess a solid lipid core matrix that can solubilize lipophilic molecules and can be stabilized with surfactants and/or emulsifiers. In a further embodiment, the lipid nanoparticle can be a self-assembly lipid-polymer nanoparticle (see Zhang et al., ACS Nano, 2008, 2 (8), pp 1696-1702; the contents of which are herein incorporated by reference in its entirety). As a non-limiting example, the SLN can be the SLN described in International Patent Publication No. WO2013105101, the contents of which are herein incorporated by reference in its entirety. As another non-limiting example, the SLN can be made by the methods or processes described in International Patent Publication No. WO2013105101, the contents of which are herein incorporated by reference in its entirety.

[1178] Liposomes, lipoplexes, or lipid nanoparticles can be used to improve the efficacy of polynucleotides directed protein production as these formulations can be able to increase cell transfection by the polynucleotide; and/or increase the translation of encoded protein. One such example involves the use of lipid encapsulation to enable the effective systemic delivery of polyplex plasmid DNA (Heyes et al., Mol Ther. 2007 15:713-720; herein incorporated by reference in its entirety). The liposomes, lipoplexes, or lipid nanoparticles can also be used to increase the stability of the polynucleotide.

[1179] In one embodiment, the Polynucleotides of the present disclosure can be formulated for controlled release and/or targeted delivery. As used herein, “controlled release” refers to a pharmaceutical composition or compound release profile that conforms to a particular pattern of release to effect a therapeutic outcome. In one embodiment, the polynucleotides can be encapsulated into a delivery agent described herein and/or known in the art for controlled release and/or targeted delivery. As used herein, the term “encapsulate” means to enclose, surround or encase. As it relates to the formulation of the compounds of the disclosure, encapsulation can be substantial, complete or partial. The term “substantially encapsulated” means that at least greater than 50, 60, 70, 80, 85, 90, 95, 96, 97, 98, 99, 99.9, 99.9 or greater than 99.999% of the pharmaceutical composition or compound of the disclosure can be enclosed, surrounded or encased within the delivery agent. “Partially encapsulation” means that less than 10, 10, 20, 30, 40 50 or less of the pharmaceutical composition or compound of the disclosure can be enclosed, surrounded or encased within the delivery agent. Advantageously, encapsulation can be determined by measuring the escape or the activity of the pharmaceutical composition or compound of the disclosure using fluorescence and/or electron micrograph. For example, at least 1, 5, 10, 20, 30, 40, 50, 60, 70, 80, 85, 90, 95, 96, 97, 98, 99, 99.9, 99.99 or greater than 99.99% of the pharmaceutical composition or compound of the disclosure are encapsulated in the delivery agent.

[1180] In one embodiment, the controlled release formulation can include, but is not limited to, tri-block co-polymers. As a non-limiting example, the formulation can include two different types of tri-block co-polymers (International Pub. No. WO2012131104 and WO2012131106; the contents of each of which is herein incorporated by reference in its entirety).

[1181] In another embodiment, the Polynucleotides can be encapsulated into a lipid nanoparticle or a rapidly eliminated lipid nanoparticle and the lipid nanoparticles or a rapidly eliminated lipid nanoparticle can then be encapsulated into a polymer, hydrogel and/or surgical sealant described herein and/or known in the art. As a non-limiting example, the polymer, hydrogel or surgical sealant can be PLGA, ethylene vinyl acetate (EVAc), poloxamer, GELSITE® (Nanotherapeutics, Inc. Alachua, Fla.), HYLENEX® (Halozyme Therapeutics, San Diego Calif.), surgical sealants such as fibrinogen polymers (Ethicon Inc. Cornelia, Ga.), TISSELL® (Baxter International, Inc. Deerfield, Ill.), PEG-based sealants, and COSEAL® (Baxter International, Inc. Deerfield, Ill.).

[1182] In another embodiment, the lipid nanoparticle can be encapsulated into any polymer known in the art that can form a gel when injected into a subject. As another non-limiting example, the lipid nanoparticle can be encapsulated into a polymer matrix that can be biodegradable.

[1183] In one embodiment, the polynucleotide formulation for controlled release and/or targeted delivery can also include at least one controlled release coating. Controlled release coatings include, but are not limited to, OPADRY®, polyvinylpyrrolidone/vinyl acetate copolymer, polyvinylpyrrolidone, hydroxypropyl methylcellulose, hydroxypropyl cellulose, hydroxyethyl cellulose, EUDRAGIT RL®, EUDRAGIT RS® and cellulose derivatives such as ethylcellulose aqueous dispersions (AQUACOAT® and SURELEASE®).

[1184] In one embodiment, the polynucleotide controlled release and/or targeted delivery formulation can comprise at least one degradable polyester that can contain polycationic side chains. Degradable polyesters include, but are not limited to, poly(serine ester), poly(L-lactide-co-L-lysine), poly(4-hydroxy-L-proline ester), and combinations thereof. In another embodiment, the degradable polyesters can include a PEG conjugation to form a PEGylated polymer.

[1185] In one embodiment, the polynucleotide controlled release and/or targeted delivery formulation comprising at least one polynucleotide can comprise at least one PEG and/or PEG related polymer derivatives as described in U.S. Pat. No. 8,404,222, herein incorporated by reference in its entirety.

[1186] In another embodiment, the polynucleotide controlled release delivery formulation comprising at least one polynucleotide can be the controlled release polymer system described in US20130130348, herein incorporated by reference in its entirety.

[1187] In one embodiment, the Polynucleotides of the present disclosure can be encapsulated in a therapeutic nanoparticle, referred to herein as “therapeutic nanoparticle polynucleotides.” Therapeutic nanoparticles can be formulated by methods described herein and known in the art such as, but not limited to, International Pub Nos. WO2010005740, WO2010030763, WO2010005721, WO2010005723, WO2012054923, US Pub. Nos. US20110262491, US20100104645, US20100087337, US20100068285, US20110274759, US20100068286, US20120288541, US20130123351 and US20130230567 and U.S. Pat. Nos. 8,206,747, 8,293,276, 8,318,208 and 8,318,211; the contents of each of which are herein incorporated by reference in their entirety. In another embodiment, therapeutic polymer nanoparticles can be identified by the methods described in US Pub No. US20120140790, the contents of which is herein incorporated by reference in its entirety.

[1188] In one embodiment, the therapeutic nanoparticle polynucleotide can be formulated for sustained release. As used herein, “sustained release” refers to a pharmaceutical composition or compound that conforms to a release rate over a specific period of time. The period of time can include, but is not limited to, hours, days, weeks, months and years. As a non-limiting example, the sustained release nanoparticle can comprise a polymer and a therapeutic agent such as, but not limited to, the polynucleotides of the present disclosure (see International Pub No. 2010075072 and US Pub No. US20100216804, US20110217377 and US20120201859, each of which is herein incorporated by reference in their entirety). In another non-limiting example, the sustained release formulation can comprise agents that permit persistent bioavailability such as, but not limited to, crystals, macromolecular gels and/or particulate suspensions (see US Patent Publication No US20130150295, the contents of which is herein incorporated by reference in its entirety).

[1189] In one embodiment, the therapeutic nanoparticle Polynucleotides can be formulated to be target specific. As a non-limiting example, the therapeutic nanoparticles can include a corticosteroid (see International Pub. No. WO2011084518; herein incorporated by reference in its entirety). As a non-limiting example, the therapeutic nanoparticles can be formulated in nanoparticles described in International Pub No. WO2008121949, WO2010005726, WO2010005725, WO2011084521 and US Pub No. US20100069426, US20120004293 and US20100104655, each of which is herein incorporated by reference in their entirety.

[1190] In one embodiment, the nanoparticles of the present disclosure can comprise a polymeric matrix. As a non-limiting example, the nanoparticle can comprise two or more polymers such as, but not limited to, polyethylenes, polycarbonates, polyanhydrides, polyhydroxyacids, polypropylfumerates, polycaprolactones, polyamides, polyacetals, polyethers, polyesters, poly(orthoesters), polycyanoacrylates, polyvinyl alcohols, polyurethanes, polyphosphazenes, polyacrylates, polymethacrylates, polycyanoacrylates, polyureas, polystyrenes, polyamines, polylysine, poly(ethylene imine), poly(serine ester), poly(L-lactide-co-L-lysine), poly(4-hydroxy-L-proline ester) or combinations thereof.

[1191] In one embodiment, the therapeutic nanoparticle comprises a diblock copolymer. In one embodiment, the diblock copolymer can include PEG in combination with a polymer such as, but not limited to, polyethylenes, polycarbonates, polyanhydrides, polyhydroxyacids, polypropylfumerates, polycaprolactones, polyamides, polyacetals, polyethers, polyesters, poly(orthoesters), polycyanoacrylates, polyvinyl alcohols, polyurethanes, polyphosphazenes, polyacrylates, polymethacrylates, polycyanoacrylates, polyureas, polystyrenes, polyamines, polylysine, poly(ethylene imine), poly(serine ester), poly(L-lactide-co-L-lysine), poly(4-hydroxy-L-proline ester) or combinations thereof. In another embodiment, the diblock copolymer can comprise the diblock copolymers described in European Patent Publication No. the contents of which are herein incorporated by reference in its entirety. In yet another embodiment, the diblock copolymer can be a high-X diblock copolymer such as those described in International Patent Publication No. WO2013120052, the contents of which are herein incorporated by reference in its entirety.

[1192] As a non-limiting example the therapeutic nanoparticle comprises a PLGA-PEG block copolymer (see US Pub. No. US20120004293 and U.S. Pat. No. 8,236,330, each of which is herein incorporated by reference in their entirety). In another non-limiting example, the therapeutic nanoparticle is a stealth nanoparticle comprising a diblock copolymer of PEG and PLA or PEG and PLGA (see U.S. Pat. No. 8,246,968 and International Publication No. WO2012166923, the contents of each of which are herein incorporated by reference in its entirety). In yet another non-limiting example, the therapeutic nanoparticle is a stealth nanoparticle or a target-specific stealth nanoparticle as described in US Patent Publication No. US20130172406, the contents of which are herein incorporated by reference in its entirety.

[1193] In one embodiment, the therapeutic nanoparticle can comprise a multiblock copolymer (see, e.g., U.S. Pat. Nos. 8,263,665 and 8,287,910 and US Patent Pub. No. US20130195987; the contents of each of which are herein incorporated by reference in its entirety).

[1194] In yet another non-limiting example, the lipid nanoparticle comprises the block copolymer PEG-PLGA-PEG (see, e.g., the thermosensitive hydrogel (PEG-PLGA-PEG) was used as a TGF-beta1 gene delivery vehicle in Lee et al. Thermosensitive Hydrogel as a Tgf-β1 Gene Delivery Vehicle Enhances Diabetic Wound Healing. Pharmaceutical Research, 2003 20(12): 1995-2000; as a controlled gene delivery system in Li et al. Controlled Gene Delivery System Based on Thermosensitive Biodegradable Hydrogel. Pharmaceutical Research 2003 20(6):884-888; and Chang et al., Non-ionic amphiphilic biodegradable PEG-PLGA-PEG copolymer enhances gene delivery efficiency in rat skeletal muscle. J Controlled Release. 2007 118:245-253; each of which is herein incorporated by reference in its entirety). The Polynucleotides of the present disclosure can be formulated in lipid nanoparticles comprising the PEG-PLGA-PEG block copolymer.

[1195] In one embodiment, the therapeutic nanoparticle can comprise a multiblock copolymer (see, e.g., U.S. Pat. Nos. 8,263,665 and 8,287,910 and US Patent Pub. No. US20130195987; the contents of each of which are herein incorporated by reference in its entirety).

[1196] In one embodiment, the block copolymers described herein can be included in a polyion complex comprising a non-polymeric micelle and the block copolymer (see, e.g., U.S. Pub. No. 20120076836; herein incorporated by reference in its entirety).

[1197] In one embodiment, the therapeutic nanoparticle can comprise at least one acrylic polymer. Acrylic polymers include but are not limited to, acrylic acid, methacrylic acid, acrylic acid and methacrylic acid copolymers, methyl methacrylate copolymers, ethoxyethyl methacrylates, cyanoethyl methacrylate, amino alkyl methacrylate copolymer, poly(acrylic acid), poly(methacrylic acid), polycyanoacrylates and combinations thereof.

[1198] In one embodiment, the therapeutic nanoparticles can comprise at least one poly(vinyl ester) polymer. The poly(vinyl ester) polymer can be a copolymer such as a random copolymer. As a non-limiting example, the random copolymer can have a structure such as those described in International Application No. WO2013032829 or US Patent Publication No US20130121954, the contents of which are herein incorporated by reference in its entirety. In one aspect, the poly(vinyl ester) polymers can be conjugated to the polynucleotides described herein. In another aspect, the poly(vinyl ester) polymer that can be used in the present disclosure can be those described in, herein incorporated by reference in its entirety.

[1199] In one embodiment, the therapeutic nanoparticle can comprise at least one diblock copolymer. The diblock copolymer can be, but it not limited to, a poly(lactic) acid-poly(ethylene)glycol copolymer (see, e.g., International Patent Publication No. WO2013044219; herein incorporated by reference in its entirety).

[1200] In one embodiment, the therapeutic nanoparticles can comprise at least one cationic polymer described herein and/or known in the art.

[1201] In one embodiment, the therapeutic nanoparticles can comprise at least one amine-containing polymer such as, but not limited to polylysine, polyethylene imine, poly(amidoamine) dendrimers, poly(beta-amino esters) (see, e.g., U.S. Pat. No. 8,287,849; herein incorporated by reference in its entirety) and combinations thereof.

[1202] In another embodiment, the nanoparticles described herein can comprise an amine cationic lipid such as those described in International Patent Application No. WO2013059496, the contents of which are herein incorporated by reference in its entirety. In one aspect the cationic lipids can have an amino-amine or an amino-amide moiety.

[1203] In one embodiment, the therapeutic nanoparticles can comprise at least one degradable polyester that can contain polycationic side chains. Degradable polyesters include, but are not limited to, poly(serine ester), poly(L-lactide-co-L-lysine), poly(4-hydroxy-L-proline ester), and combinations thereof. In another embodiment, the degradable polyesters can include a PEG conjugation to form a PEGylated polymer.

[1204] In another embodiment, the therapeutic nanoparticle can include a conjugation of at least one targeting ligand. The targeting ligand can be any ligand known in the art such as, but not limited to, a monoclonal antibody. (Kirpotin et al, Cancer Res. 2006 66:6732-6740; herein incorporated by reference in its entirety).

[1205] In one embodiment, the therapeutic nanoparticle Polynucleotides, e.g., therapeutic nanoparticles comprising at least one polynucleotide can be formulated using the methods described by Podobinski et al in U.S. Pat. No. 8,404,799, the contents of which are herein incorporated by reference in its entirety.

[1206] In one embodiment, the Polynucleotides can be encapsulated in, linked to and/or associated with synthetic nanocarriers. Synthetic nanocarriers include, but are not limited to, those described in International Pub. Nos. WO2010005740, WO2010030763, WO201213501, WO2012149252, WO2012149255, WO2012149259, WO2012149265, WO2012149268, WO2012149282, WO2012149301, WO2012149393, WO2012149405, WO2012149411, WO2012149454 and WO2013019669, and US Pub. Nos. US20110262491, US20100104645, US20100087337 and US20120244222, each of which is herein incorporated by reference in their entirety. The synthetic nanocarriers can be formulated using methods known in the art and/or described herein. As a non-limiting example, the synthetic nanocarriers can be formulated by the methods described in International Pub Nos. WO2010005740, WO2010030763 and WO201213501 and US Pub. Nos. US20110262491, US20100104645, US20100087337 and US2012024422, each of which is herein incorporated by reference in their entirety. In another embodiment, the synthetic nanocarrier formulations can be lyophilized by methods described in International Pub. No. WO2011072218 and U.S. Pat. No. 8,211,473; the content of each of which is herein incorporated by reference in their entirety. In yet another embodiment, formulations of the present disclosure, including, but not limited to, synthetic nanocarriers, can be lyophilized or reconstituted by the methods described in US Patent Publication No. US20130230568, the contents of which are herein incorporated by reference in its entirety.

[1207] In one embodiment, the synthetic nanocarriers can contain reactive groups to release the polynucleotides described herein (see International Pub. No. WO20120952552 and US Pub No. US20120171229, each of which is herein incorporated by reference in their entirety).

[1208] In one embodiment, the synthetic nanocarriers can be formulated for targeted release. In one embodiment, the synthetic nanocarrier is formulated to release the polynucleotides at a specified pH and/or after a desired time interval. As a non-limiting example, the synthetic nanoparticle can be formulated to release the polynucleotides after 24 hours and/or at a pH of 4.5 (see International Pub. Nos. WO2010138193 and WO2010138194 and US Pub Nos. US20110020388 and US20110027217, each of which is herein incorporated by reference in their entireties).

[1209] In one embodiment, the synthetic nanocarriers can be formulated for controlled and/or sustained release of the polynucleotides described herein. As a non-limiting example, the synthetic nanocarriers for sustained release can be formulated by methods known in the art, described herein and/or as described in International Pub No. WO2010138192 and US Pub No. 20100303850, each of which is herein incorporated by reference in their entirety.

[1210] In one embodiment, the polynucleotide can be formulated for controlled and/or sustained release wherein the formulation comprises at least one polymer that is a crystalline side chain (CYSC) polymer. CYSC polymers are described in U.S. Pat. No. 8,399,007, herein incorporated by reference in its entirety.

[1211] In one embodiment, the synthetic nanocarrier can comprise at least one polynucleotide that encodes at least one adjuvant. As non-limiting example, the adjuvant can comprise dimethyldioctadecylammonium-bromide, dimethyldioctadecylammonium-chloride, dimethyldioctadecylammonium-phosphate or dimethyldioctadecylammonium-acetate (DDA) and an apolar fraction or part of said apolar fraction of a total lipid extract of a mycobacterium (See, e.g., U.S. Pat. No. 8,241,610; herein incorporated by reference in its entirety). In another embodiment, the synthetic nanocarrier can comprise at least one polynucleotide and an adjuvant. As a non-limiting example, the synthetic nanocarrier comprising and adjuvant can be formulated by the methods described in International Pub No. WO2011150240 and US Pub No. US20110293700, each of which is herein incorporated by reference in its entirety.

[1212] In one embodiment, the synthetic nanocarrier can encapsulate at least one polynucleotide that encodes a peptide, fragment or region from a virus. As a non-limiting example, the synthetic nanocarrier can include, but is not limited to, the nanocarriers described in International Pub No. WO2012024621, WO201202629, WO2012024632 and US Pub No. US20120064110, US20120058153 and US20120058154, each of which is herein incorporated by reference in their entirety.

[1213] In one embodiment, the synthetic nanocarrier can be coupled to a polynucleotide that can be able to trigger a humoral and/or cytotoxic T lymphocyte (CTL) response (see, e.g., International Publication No. WO2013019669, herein incorporated by reference in its entirety).

[1214] In one embodiment, the polynucleotide can be encapsulated in, linked to and/or associated with zwitterionic lipids. Non-limiting examples of zwitterionic lipids and methods of using zwitterionic lipids are described in US Patent Publication No. US20130216607, the contents of which are herein incorporated by reference in its entirety. In one aspect, the zwitterionic lipids can be used in the liposomes and lipid nanoparticles described herein.

[1215] In one embodiment, the polynucleotide can be formulated in colloid nanocarriers as described in US Patent Publication No. US20130197100, the contents of which are herein incorporated by reference in its entirety.

[1216] In one embodiment, the nanoparticle can be optimized for oral administration. The nanoparticle can comprise at least one cationic biopolymer such as, but not limited to, chitosan or a derivative thereof. As a non-limiting example, the nanoparticle can be formulated by the methods described in U.S. Pub. No. 20120282343; herein incorporated by reference in its entirety.

[1217] In some embodiments, LNPs comprise the lipid KL52 (an amino-lipid disclosed in U.S. Application Publication No. 2012/0295832 expressly incorporated herein by reference in its entirety). Activity and/or safety (as measured by examining one or more of ALT/AST, white blood cell count and cytokine induction) of LNP administration can be improved by incorporation of such lipids. LNPs comprising KL52 can be administered intravenously and/or in one or more doses. In some embodiments, administration of LNPs comprising KL52 results in equal or improved mRNA and/or protein expression as compared to LNPs comprising MC3.

[1218] In some embodiments, polynucleotide can be delivered using smaller LNPs. Such particles can comprise a diameter from below 0.1 um up to 100 nm such as, but not limited to, less than 0.1 um, less than 1.0 um, less than 5 um, less than 10 um, less than 15 um, less than 20 um, less than 25 um, less than 30 um, less than 35 um, less than 40 um, less than 50 um, less than 55 um, less than 60 um, less than 65 um, less than 70 um, less than 75 um, less than 80 um, less than 85 um, less than 90 um, less than 95 um, less than 100 um, less than 125 um, less than 150 um, less than 175 um, less than 200 um, less than 225 um, less than 250 um, less than 275 um, less than 300 um, less than 325 um, less than 350 um, less than 375 um, less than 400 um, less than 425 um, less than 450 um, less than 475 um, less than 500 um, less than 525 um, less than 550 um, less than 575 um, less than 600 um, less than 625 um, less than 650 um, less than 675 um, less than 700 um, less than 725 um, less than 750 um, less than 775 um, less than 800 um, less than 825 um, less than 850 um, less than 875 um, less than 900 um, less than 925 um, less than 950 um, or less than 975 um.

[1219] In another embodiment, polynucleotides can be delivered using smaller LNPs that can comprise a diameter from about 1 nm to about 100 nm, from about 1 nm to about 10 nm, about 1 nm to about 20 nm, from about 1 nm to about 30 nm, from about 1 nm to about 40 nm, from about 1 nm to about 50 nm, from about 1 nm to about 60 nm, from about 1 nm to about 70 nm, from about 1 nm to about 80 nm, from about 1 nm to about 90 nm, from about 5 nm to about from 100 nm, from about 5 nm to about 10 nm, about 5 nm to about 20 nm, from about 5 nm to about 30 nm, from about 5 nm to about 40 nm, from about 5 nm to about 50 nm, from about 5 nm to about 60 nm, from about 5 nm to about 70 nm, from about 5 nm to about 80 nm, from about 5 nm to about 90 nm, about 10 to about 50 nM, from about 20 to about 50 nm, from about 30 to about 50 nm, from about 40 to about 50 nm, from about 20 to about 60 nm, from about 30 to about 60 nm, from about 40 to about 60 nm, from about 20 to about 70 nm, from about 30 to about 70 nm, from about 40 to about 70 nm, from about 50 to about 70 nm, from about 60 to about 70 nm, from about 20 to about 80 nm, from about 30 to about 80 nm, from about 40 to about 80 nm, from about 50 to about 80 nm, from about 60 to about 80 nm, from about 20 to about 90 nm, from about 30 to about 90 nm, from about 40 to about 90 nm, from about 50 to about 90 nm, from about 60 to about 90 nm and/or from about 70 to about 90 nm.

[1220] In some embodiments, such LNPs are synthesized using methods comprising microfluidic mixers. Exemplary microfluidic mixers can include, but are not limited to a slit interdigitial micromixer including, but not limited to those manufactured by Microinnova (Allerheiligen bei Wildon, Austria) and/or a staggered herringbone micromixer (SHM) (Zhigaltsev, I. V. et al., Bottom-up design and synthesis of limit size lipid nanoparticle systems with aqueous and triglyceride cores using millisecond microfluidic mixing have been published (Langmuir. 2012. 28:3633-40; Belliveau, N. M. et al., Microfluidic synthesis of highly potent limit-size lipid nanoparticles for in vivo delivery of siRNA. Molecular Therapy-Nucleic Acids. 2012. 1:e37; Chen, D. et al., Rapid discovery of potent siRNA-containing lipid nanoparticles enabled by controlled microfluidic formulation. J Am Chem Soc. 2012. 134(16):6948-51; each of which is herein incorporated by reference in its entirety). In some embodiments, methods of LNP generation comprising SHM, further comprise the mixing of at least two input streams wherein mixing occurs by microstructure-induced chaotic advection (MICA). According to this method, fluid streams flow through channels present in a herringbone pattern causing rotational flow and folding the fluids around each other. This method can also comprise a surface for fluid mixing wherein the surface changes orientations during fluid cycling. Methods of generating LNPs using SHM include those disclosed in U.S. Application Publication Nos. 2004/0262223 and 2012/0276209, each of which is expressly incorporated herein by reference in their entirety.

[1221] In one embodiment, the polynucleotide of the present disclosure can be formulated in lipid nanoparticles created using a micromixer such as, but not limited to, a Slit Interdigital Microstructured Mixer (SIMM-V2) or a Standard Slit Interdigital Micro Mixer (SSIMM) or Caterpillar (CPMM) or Impinging-jet (IJMM) from the Institut für Mikrotechnik Mainz GmbH, Mainz Germany).

[1222] In one embodiment, the polynucleotides of the present disclosure can be formulated in lipid nanoparticles created using microfluidic technology (see Whitesides, George M. The Origins and the Future of Microfluidics. Nature, 2006 442: 368-373; and Abraham et al. Chaotic Mixer for Microchannels. Science, 2002 295: 647-651; each of which is herein incorporated by reference in its entirety). As a non-limiting example, controlled microfluidic formulation includes a passive method for mixing streams of steady pressure-driven flows in micro channels at a low Reynolds number (see, e.g., Abraham et al. Chaotic Mixer for Microchannels. Science, 2002 295: 647-651; which is herein incorporated by reference in its entirety).

[1223] In one embodiment, the polynucleotides of the present disclosure can be formulated in lipid nanoparticles created using a micromixer chip such as, but not limited to, those from Harvard Apparatus (Holliston, Mass.) or Dolomite Microfluidics (Royston, UK). A micromixer chip can be used for rapid mixing of two or more fluid streams with a split and recombine mechanism.

[1224] In one embodiment, the polynucleotides of the disclosure can be formulated for delivery using the drug encapsulating microspheres described in International Patent Publication No. WO2013063468 or U.S. Pat. No. 8,440,614, each of which is herein incorporated by reference in its entirety. The microspheres can comprise a compound of the formula (I), (II), (III), (IV), (V) or (VI) as described in International Patent Publication No. WO2013063468, the contents of which are herein incorporated by reference in its entirety. In another aspect, the amino acid, peptide, polypeptide, lipids (APPL) are useful in delivering the polynucleotides of the disclosure to cells (see International Patent Publication No. WO2013063468, the contents of which is herein incorporated by reference in its entirety).

[1225] In one embodiment, the polynucleotides of the disclosure can be formulated in lipid nanoparticles having a diameter from about 10 to about 100 nm such as, but not limited to, about 10 to about 20 nm, about 10 to about 30 nm, about 10 to about 40 nm, about 10 to about 50 nm, about 10 to about 60 nm, about 10 to about 70 nm, about 10 to about 80 nm, about 10 to about 90 nm, about 20 to about 30 nm, about 20 to about 40 nm, about 20 to about 50 nm, about 20 to about 60 nm, about 20 to about 70 nm, about 20 to about 80 nm, about 20 to about 90 nm, about 20 to about 100 nm, about 30 to about 40 nm, about 30 to about 50 nm, about 30 to about 60 nm, about 30 to about 70 nm, about 30 to about 80 nm, about 30 to about 90 nm, about 30 to about 100 nm, about 40 to about 50 nm, about 40 to about 60 nm, about 40 to about 70 nm, about 40 to about 80 nm, about 40 to about 90 nm, about 40 to about 100 nm, about 50 to about 60 nm, about 50 to about 70 nm about 50 to about 80 nm, about 50 to about 90 nm, about 50 to about 100 nm, about 60 to about 70 nm, about 60 to about 80 nm, about 60 to about 90 nm, about 60 to about 100 nm, about 70 to about 80 nm, about 70 to about 90 nm, about 70 to about 100 nm, about 80 to about 90 nm, about 80 to about 100 nm and/or about 90 to about 100 nm.

[1226] In one embodiment, the lipid nanoparticles can have a diameter from about 10 to 500 nm.

[1227] In one embodiment, the lipid nanoparticle can have a diameter greater than 100 nm, greater than 150 nm, greater than 200 nm, greater than 250 nm, greater than 300 nm, greater than 350 nm, greater than 400 nm, greater than 450 nm, greater than 500 nm, greater than 550 nm, greater than 600 nm, greater than 650 nm, greater than 700 nm, greater than 750 nm, greater than 800 nm, greater than 850 nm, greater than 900 nm, greater than 950 nm or greater than 1000 nm.

[1228] In one aspect, the lipid nanoparticle can be a limit size lipid nanoparticle described in International Patent Publication No. WO2013059922, the contents of which are herein incorporated by reference in its entirety. The limit size lipid nanoparticle can comprise a lipid bilayer surrounding an aqueous core or a hydrophobic core; where the lipid bilayer can comprise a phospholipid such as, but not limited to, diacylphosphatidylcholine, a diacylphosphatidylethanolamine, a ceramide, a sphingomyelin, a dihydrosphingomyelin, a cephalin, a cerebroside, a C8-C20 fatty acid diacylphophatidylcholine, and 1-palmitoyl-2-oleoyl phosphatidylcholine (POPC). In another aspect the limit size lipid nanoparticle can comprise a polyethylene glycol-lipid such as, but not limited to, DLPE-PEG, DMPE-PEG, DPPC-PEG and DSPE-PEG.

[1229] In one embodiment, the polynucleotides can be delivered, localized and/or concentrated in a specific location using the delivery methods described in International Patent Publication No. WO2013063530, the contents of which are herein incorporated by reference in its entirety. As a non-limiting example, a subject can be administered an empty polymeric particle prior to, simultaneously with or after delivering the polynucleotides to the subject. The empty polymeric particle undergoes a change in volume once in contact with the subject and becomes lodged, embedded, immobilized or entrapped at a specific location in the subject.

[1230] In one embodiment, the polynucleotides can be formulated in an active substance release system (see, e.g., US Patent Publication No. US20130102545, the contents of which is herein incorporated by reference in its entirety). The active substance release system can comprise 1) at least one nanoparticle bonded to an oligonucleotide inhibitor strand that is hybridized with a catalytically active nucleic acid and 2) a compound bonded to at least one substrate molecule bonded to a therapeutically active substance (e.g., polynucleotides described herein), where the therapeutically active substance is released by the cleavage of the substrate molecule by the catalytically active nucleic acid.

[1231] In one embodiment, the polynucleotides can be formulated in a nanoparticle comprising an inner core comprising a non-cellular material and an outer surface comprising a cellular membrane. The cellular membrane can be derived from a cell or a membrane derived from a virus. As a non-limiting example, the nanoparticle can be made by the methods described in International Patent Publication No. WO2013052167, herein incorporated by reference in its entirety. As another non-limiting example, the nanoparticle described in International Patent Publication No. WO2013052167, herein incorporated by reference in its entirety, can be used to deliver the polynucleotides described herein.

[1232] In one embodiment, the polynucleotides can be formulated in porous nanoparticle-supported lipid bilayers (protocells). Protocells are described in International Patent Publication No. WO2013056132, the contents of which are herein incorporated by reference in its entirety.

[1233] In one embodiment, the polynucleotides described herein can be formulated in polymeric nanoparticles as described in or made by the methods described in U.S. Pat. Nos. 8,420,123 and 8,518,963 and European Patent No. EP2073848B1, the contents of each of which are herein incorporated by reference in their entirety. As a non-limiting example, the polymeric nanoparticle can have a high glass transition temperature such as the nanoparticles described in or nanoparticles made by the methods described in U.S. Pat. No. 8,518,963, the contents of which are herein incorporated by reference in its entirety. As another non-limiting example, the polymer nanoparticle for oral and parenteral formulations can be made by the methods described in European Patent No. EP2073848B1, the contents of which are herein incorporated by reference in its entirety.

[1234] In another embodiment, the polynucleotides described herein can be formulated in nanoparticles used in imaging. The nanoparticles can be liposome nanoparticles such as those described in US Patent Publication No US20130129636, herein incorporated by reference in its entirety. As a non-limiting example, the liposome can comprise gadolinium(III)2-{4,7-bis-carboxymethyl-10-[(N,N-distearylamidomethyl-N′-amido-methyl]-1,4,7,10-tetra-azacyclododec-1-yl}-acetic acid and a neutral, fully saturated phospholipid component (see, e.g., US Patent Publication No US20130129636, the contents of which is herein incorporated by reference in its entirety).

[1235] In one embodiment, the nanoparticles that can be used in the present disclosure are formed by the methods described in U.S. Patent Application No. US20130130348, the contents of which is herein incorporated by reference in its entirety.

[1236] The nanoparticles of the present disclosure can further include nutrients such as, but not limited to, those which deficiencies can lead to health hazards from anemia to neural tube defects (see e.g., the nanoparticles described in International Patent Publication No WO2013072929, the contents of which is herein incorporated by reference in its entirety). As a non-limiting example, the nutrient can be iron in the form of ferrous, ferric salts or elemental iron, iodine, folic acid, vitamins or micronutrients.

[1237] In one embodiment, the polynucleotides of the present disclosure can be formulated in a swellable nanoparticle. The swellable nanoparticle can be, but is not limited to, those described in U.S. Pat. No. 8,440,231, the contents of which is herein incorporated by reference in its entirety. As a non-limiting embodiment, the swellable nanoparticle can be used for delivery of the polynucleotides of the present disclosure to the pulmonary system (see, e.g., U.S. Pat. No. 8,440,231, the contents of which is herein incorporated by reference in its entirety).

[1238] The polynucleotides of the present disclosure can be formulated in polyanhydride nanoparticles such as, but not limited to, those described in U.S. Pat. No. 8,449,916, the contents of which is herein incorporated by reference in its entirety.

[1239] The nanoparticles and microparticles of the present disclosure can be geometrically engineered to modulate macrophage and/or the immune response. In one aspect, the geometrically engineered particles can have varied shapes, sizes and/or surface charges in order to incorporated the polynucleotides of the present disclosure for targeted delivery such as, but not limited to, pulmonary delivery (see, e.g., International Publication No WO2013082111, the contents of which is herein incorporated by reference in its entirety). Other physical features the geometrically engineering particles can have include, but are not limited to, fenestrations, angled arms, asymmetry and surface roughness, charge that can alter the interactions with cells and tissues. As a non-limiting example, nanoparticles of the present disclosure can be made by the methods described in International Publication No WO2013082111, the contents of which is herein incorporated by reference in its entirety.

[1240] In one embodiment, the nanoparticles of the present disclosure can be water soluble nanoparticles such as, but not limited to, those described in International Publication No. WO2013090601, the contents of which is herein incorporated by reference in its entirety. The nanoparticles can be inorganic nanoparticles that have a compact and zwitterionic ligand in order to exhibit good water solubility. The nanoparticles can also have small hydrodynamic diameters (HD), stability with respect to time, pH, and salinity and a low level of non-specific protein binding.

[1241] In one embodiment the nanoparticles of the present disclosure can be developed by the methods described in US Patent Publication No. US20130172406, the contents of which are herein incorporated by reference in its entirety.

[1242] In one embodiment, the nanoparticles of the present disclosure are stealth nanoparticles or target-specific stealth nanoparticles such as, but not limited to, those described in US Patent Publication No. US20130172406; the contents of which is herein incorporated by reference in its entirety. The nanoparticles of the present disclosure can be made by the methods described in US Patent Publication No. US20130172406, the contents of which are herein incorporated by reference in its entirety.

[1243] In another embodiment, the stealth or target-specific stealth nanoparticles can comprise a polymeric matrix. The polymeric matrix can comprise two or more polymers such as, but not limited to, polyethylenes, polycarbonates, polyanhydrides, polyhydroxyacids, polypropylfumerates, polycaprolactones, polyamides, polyacetals, polyethers, polyesters, poly(orthoesters), polycyanoacrylates, polyvinyl alcohols, polyurethanes, polyphosphazenes, polyacrylates, polymethacrylates, polycyanoacrylates, polyureas, polystyrenes, polyamines, polyesters, polyanhydrides, polyethers, polyurethanes, polymethacrylates, polyacrylates, polycyanoacrylates or combinations thereof.

[1244] In one embodiment, the nanoparticle can be a nanoparticle-nucleic acid hybrid structure having a high density nucleic acid layer. As a non-limiting example, the nanoparticle-nucleic acid hybrid structure can made by the methods described in US Patent Publication No. US20130171646, the contents of which are herein incorporated by reference in its entirety. The nanoparticle can comprise a nucleic acid such as, but not limited to, polynucleotides described herein and/or known in the art.

[1245] At least one of the nanoparticles of the present disclosure can be embedded in in the core a nanostructure or coated with a low density porous 3-D structure or coating that is capable of carrying or associating with at least one payload within or on the surface of the nanostructure. Non-limiting examples of the nanostructures comprising at least one nanoparticle are described in International Patent Publication No. WO2013123523, the contents of which are herein incorporated by reference in its entirety.

### Amino Acid Lipids

[1246] The disclosure also includes pharmaceutical compositions that comprise a formulation of the polynucleotide described herein, i.e., a polynucleotide comprising an ORF encoding an MCM polypeptide, with amino acid lipids. Amino acid lipids are lipophilic compounds comprising an amino acid residue and one or more lipophilic tails. Non-limiting examples of amino acid lipids and methods of making amino acid lipids are described in U.S. Pat. No. 8,501,824, the contents of which are herein incorporated by reference in its entirety.

[1247] In some embodiments, the amino acid lipids have a hydrophilic portion and a lipophilic portion. The hydrophilic portion can be an amino acid residue and a lipophilic portion can comprise at least one lipophilic tail.

[1248] In some embodiments, the amino acid lipid formulations can be used to deliver the polynucleotides to a subject.

[1249] In another embodiment, the amino acid lipid formulations can deliver a polynucleotide in releasable form that comprises an amino acid lipid that binds and releases the polynucleotides. As a non-limiting example, the release of the polynucleotides can be provided by an acid-labile linker such as, but not limited to, those described in U.S. Pat. Nos. 7,098,032, 6,897,196, 6,426,086, 7,138,382, 5,563,250, and 5,505,931, the contents of each of which are herein incorporated by reference in its entirety.

### Polymers, Biodegradable Nanoparticles, and Core-Shell Nanoparticles

[1250] The disclosure also includes pharmaceutical compositions that comprise a formulation of the polynucleotide described herein, i.e., a polynucleotide comprising an ORF encoding an MCM polypeptide, using natural and/or synthetic polymers. Non-limiting examples of polymers that can be used for delivery include, but are not limited to, DYNAMIC POLYCONJUGATE® (Arrowhead Research Corp., Pasadena, Calif.) formulations from MIRUS® Bio (Madison, Wis.) and Roche Madison (Madison, Wis.), PHASERX™ polymer formulations such as, without limitation, SMARTT POLYMER TECHNOLOGY™ (PHASERX®, Seattle, Wash.), DMRI/DOPE, poloxamer, VAXFECTIN® adjuvant from Vical (San Diego, Calif.), chitosan, cyclodextrin from Calando Pharmaceuticals (Pasadena, Calif.), dendrimers and poly(lactic-co-glycolic acid) (PLGA) polymers. RONDEL™ (RNAi/Oligonucleotide Nanoparticle Delivery) polymers (Arrowhead Research Corporation, Pasadena, Calif.) and pH responsive co-block polymers such as, but not limited to, PHASERX® (Seattle, Wash.).

[1251] A non-limiting example of chitosan formulation includes a core of positively charged chitosan and an outer portion of negatively charged substrate (U.S. Pub. No. 20120258176; herein incorporated by reference in its entirety). Chitosan includes, but is not limited to N-trimethyl chitosan, mono-N-carboxymethyl chitosan (MCC), N-palmitoyl chitosan (NPCS), EDTA-chitosan, low molecular weight chitosan, chitosan derivatives, or combinations thereof.

[1252] In some embodiments, the polymers used in the present disclosure have undergone processing to reduce and/or inhibit the attachment of unwanted substances such as, but not limited to, bacteria, to the surface of the polymer. The polymer can be processed by methods known and/or described in the art and/or described in International Pub. No. WO2012150467, herein incorporated by reference in its entirety.

[1253] A non-limiting example of PLGA formulations include, but are not limited to, PLGA injectable depots (e.g., ELIGARD® which is formed by dissolving PLGA in 66% N-methyl-2-pyrrolidone (NMP) and the remainder being aqueous solvent and leuprolide. Once injected, the PLGA and leuprolide peptide precipitates into the subcutaneous space).

[1254] Many of these polymer approaches have demonstrated efficacy in delivering oligonucleotides in vivo into the cell cytoplasm (reviewed in deFougerolles Hum Gene Ther. 2008 19:125-132; herein incorporated by reference in its entirety). Two polymer approaches that have yielded robust in vivo delivery of nucleic acids, in this case with small interfering RNA (siRNA), are dynamic polyconjugates and cyclodextrin-based nanoparticles (see, e.g., US Patent Publication No. US20130156721, herein incorporated by reference in its entirety). The first of these delivery approaches uses dynamic polyconjugates and has been shown in vivo in mice to effectively deliver siRNA and silence endogenous target mRNA in hepatocytes (Rozema et al., Proc Natl Acad Sci USA. 2007 104:12982-12887; herein incorporated by reference in its entirety). This particular approach is a multicomponent polymer system whose key features include a membrane-active polymer to which nucleic acid, in this case siRNA, is covalently coupled via a disulfide bond and where both PEG (for charge masking) and N-acetylgalactosamine (for hepatocyte targeting) groups are linked via pH-sensitive bonds (Rozema et al., Proc Natl Acad Sci USA. 2007 104:12982-12887; herein incorporated by reference in its entirety). On binding to the hepatocyte and entry into the endosome, the polymer complex disassembles in the low-pH environment, with the polymer exposing its positive charge, leading to endosomal escape and cytoplasmic release of the siRNA from the polymer. Through replacement of the N-acetylgalactosamine group with a mannose group, it was shown one could alter targeting from asialoglycoprotein receptor-expressing hepatocytes to sinusoidal endothelium and Kupffer cells. Another polymer approach involves using transferrin-targeted cyclodextrin-containing polycation nanoparticles. These nanoparticles have demonstrated targeted silencing of the EWS-FLI1 gene product in transferrin receptor-expressing Ewing's sarcoma tumor cells (Hu-Lieskovan et al., Cancer Res.2005 65: 8984-8982; herein incorporated by reference in its entirety) and siRNA formulated in these nanoparticles was well tolerated in non-human primates (Heidel et al., Proc Natl Acad Sci USA 2007 104:5715-21; herein incorporated by reference in its entirety). Both of these delivery strategies incorporate rational approaches using both targeted delivery and endosomal escape mechanisms.

[1255] The polymer formulation can permit the sustained or delayed release of polynucleotides (e.g., following intramuscular or subcutaneous injection). The altered release profile for the polynucleotide can result in, for example, translation of an encoded protein over an extended period of time. The polymer formulation can also be used to increase the stability of the polynucleotide. Biodegradable polymers have been previously used to protect nucleic acids other than polynucleotide from degradation and been shown to result in sustained release of payloads in vivo (Rozema et al., Proc Natl Acad Sci USA. 2007 104:12982-12887; Sullivan et al., Expert Opin Drug Deliv. 2010 7:1433-1446; Convertine et al., Biomacromolecules. 2010 Oct. 1; Chu et al., Acc Chem Res. 2012 Jan. 13; Manganiello et al., Biomaterials. 2012 33:2301-2309; Benoit et al., Biomacromolecules. 2011 12:2708-2714; Singha et al., Nucleic Acid Ther. 2011 2:133-147; deFougerolles Hum Gene Ther. 2008 19:125-132; Schaffert and Wagner, Gene Ther. 2008 16:1131-1138; Chaturvedi et al., Expert Opin Drug Deliv. 2011 8:1455-1468; Davis, Mol Pharm. 2009 6:659-668; Davis, Nature 2010 464:1067-1070; each of which is herein incorporated by reference in its entirety).

[1256] In some embodiments, the pharmaceutical compositions can be sustained release formulations. In a further embodiment, the sustained release formulations can be for subcutaneous delivery. Sustained release formulations can include, but are not limited to, PLGA microspheres, ethylene vinyl acetate (EVAc), poloxamer, GELSITE® (Nanotherapeutics, Inc. Alachua, Fla.), HYLENEX® (Halozyme Therapeutics, San Diego Calif.), surgical sealants such as fibrinogen polymers (Ethicon Inc. Cornelia, Ga.), TISSELL® (Baxter International, Inc. Deerfield, Ill.), PEG-based sealants, and COSEAL® (Baxter International, Inc. Deerfield, Ill.).

[1257] As a non-limiting example modified mRNA can be formulated in PLGA microspheres by preparing the PLGA microspheres with tunable release rates (e.g., days and weeks) and encapsulating the modified mRNA in the PLGA microspheres while maintaining the integrity of the modified mRNA during the encapsulation process. EVAc are non-biodegradable, biocompatible polymers that are used extensively in pre-clinical sustained release implant applications (e.g., extended release products Ocusert a pilocarpine ophthalmic insert for glaucoma or progestasert a sustained release progesterone intrauterine device; transdermal delivery systems Testoderm, Duragesic and Selegiline; catheters). Poloxamer F-407 NF is a hydrophilic, non-ionic surfactant triblock copolymer of polyoxyethylene-polyoxypropylene-polyoxyethylene having a low viscosity at temperatures less than 5° C. and forms a solid gel at temperatures greater than 15° C. PEG-based surgical sealants comprise two synthetic PEG components mixed in a delivery device that can be prepared in one minute, seals in 3 minutes and is reabsorbed within 30 days. GELSITE® and natural polymers are capable of in-situ gelation at the site of administration. They have been shown to interact with protein and peptide therapeutic candidates through ionic interaction to provide a stabilizing effect.

[1258] Polymer formulations can also be selectively targeted through expression of different ligands as exemplified by, but not limited by, folate, transferrin, and N-acetylgalactosamine (GalNAc) (Benoit et al., Biomacromolecules. 2011 12:2708-2714; Rozema et al., Proc Natl Acad Sci USA. 2007 104:12982-12887; Davis, Mol Pharm. 2009 6:659-668; Davis, Nature 2010 464:1067-1070; each of which is herein incorporated by reference in its entirety).

[1259] The polynucleotides of the disclosure can be formulated with or in a polymeric compound. The polymer can include at least one polymer such as, but not limited to, polyethenes, polyethylene glycol (PEG), poly(1-lysine)(PLL), PEG grafted to PLL, cationic lipopolymer, biodegradable cationic lipopolymer, polyethyleneimine (PEI), cross-linked branched poly(alkylene imines), a polyamine derivative, a modified poloxamer, a biodegradable polymer, elastic biodegradable polymer, biodegradable block copolymer, biodegradable random copolymer, biodegradable polyester copolymer, biodegradable polyester block copolymer, biodegradable polyester block random copolymer, multiblock copolymers, linear biodegradable copolymer, poly[α-(4-aminobutyl)-L-glycolic acid) (PAGA), biodegradable cross-linked cationic multi-block copolymers, polycarbonates, polyanhydrides, polyhydroxyacids, polypropylfumerates, polycaprolactones, polyamides, polyacetals, polyethers, polyesters, poly(orthoesters), polycyanoacrylates, polyvinyl alcohols, polyurethanes, polyphosphazenes, polyacrylates, polymethacrylates, polycyanoacrylates, polyureas, polystyrenes, polyamines, polylysine, poly(ethylene imine), poly(serine ester), poly(L-lactide-co-L-lysine), poly(4-hydroxy-L-proline ester), acrylic polymers, amine-containing polymers, dextran polymers, dextran polymer derivatives or combinations thereof.

[1260] As a non-limiting example, the polynucleotides of the disclosure can be formulated with the polymeric compound of PEG grafted with PLL as described in U.S. Pat. No. 6,177,274; herein incorporated by reference in its entirety. The formulation can be used for transfecting cells in vitro or for in vivo delivery of polynucleotide. In another example, the polynucleotide can be suspended in a solution or medium with a cationic polymer, in a dry pharmaceutical composition or in a solution that is capable of being dried as described in U.S. Pub. Nos. 20090042829 and 20090042825; each of which are herein incorporated by reference in their entireties.

[1261] As another non-limiting example the polynucleotides of the disclosure can be formulated with a PLGA-PEG block copolymer (see US Pub. No. US20120004293 and U.S. Pat. No. 8,236,330, herein incorporated by reference in their entireties) or PLGA-PEG-PLGA block copolymers (See U.S. Pat. No. 6,004,573, herein incorporated by reference in its entirety). As a non-limiting example, the polynucleotides of the disclosure can be formulated with a diblock copolymer of PEG and PLA or PEG and PLGA (see U.S. Pat. No. 8,246,968, herein incorporated by reference in its entirety).

[1262] A polyamine derivative can be used to deliver nucleic acids or to treat and/or prevent a disease or to be included in an implantable or injectable device (U.S. Pub. No. 20100260817 (now U.S. Pat. No. 8,460,696) the contents of each of which is herein incorporated by reference in its entirety). As a non-limiting example, a pharmaceutical composition can include the polynucleotide and the polyamine derivative described in U.S. Pub. No. 20100260817 (now U.S. Pat. No. 8,460,696; the contents of which are incorporated herein by reference in its entirety. As a non-limiting example the polynucleotides of the present disclosure can be delivered using a polyamine polymer such as, but not limited to, a polymer comprising a 1,3-dipolar addition polymer prepared by combining a carbohydrate diazide monomer with a dialkyne unite comprising oligoamines (U.S. Pat. No. 8,236,280; herein incorporated by reference in its entirety).

[1263] The polynucleotides of the disclosure can be formulated with at least one acrylic polymer. Acrylic polymers include but are not limited to, acrylic acid, methacrylic acid, acrylic acid and methacrylic acid copolymers, methyl methacrylate copolymers, ethoxyethyl methacrylates, cyanoethyl methacrylate, amino alkyl methacrylate copolymer, poly(acrylic acid), poly(methacrylic acid), polycyanoacrylates and combinations thereof.

[1264] In some embodiments, the polynucleotides of the present disclosure can be formulated with at least one polymer and/or derivatives thereof described in International Publication Nos. WO2011115862, WO2012082574 and WO2012068187 and U.S. Pub. No. 20120283427, each of which are herein incorporated by reference in their entireties. In another embodiment, the polynucleotides of the present disclosure can be formulated with a polymer of formula Z as described in WO2011115862, herein incorporated by reference in its entirety. In yet another embodiment, the polynucleotides can be formulated with a polymer of formula Z, Z′ or Z″ as described in International Pub. Nos. WO2012082574 or WO2012068187 and U.S. Pub. No. 2012028342, each of which are herein incorporated by reference in their entireties. The polymers formulated with the modified RNA of the present disclosure can be synthesized by the methods described in International Pub. Nos. WO2012082574 or WO2012068187, each of which are herein incorporated by reference in their entireties.

[1265] The polynucleotides of the disclosure can be formulated with at least one acrylic polymer. Acrylic polymers include but are not limited to, acrylic acid, methacrylic acid, acrylic acid and methacrylic acid copolymers, methyl methacrylate copolymers, ethoxyethyl methacrylates, cyanoethyl methacrylate, amino alkyl methacrylate copolymer, poly(acrylic acid), poly(methacrylic acid), polycyanoacrylates and combinations thereof.

[1266] Formulations of polynucleotides of the disclosure can include at least one amine-containing polymer such as, but not limited to polylysine, polyethylene imine, poly(amidoamine) dendrimers, poly(amine-co-esters) or combinations thereof. As a non-limiting example, the poly(amine-co-esters) can be the polymers described in and/or made by the methods described in International Publication No WO2013082529, the contents of which are herein incorporated by reference in its entirety.

[1267] For example, the polynucleotides of the disclosure can be formulated in a pharmaceutical compound including a poly(alkylene imine), a biodegradable cationic lipopolymer, a biodegradable block copolymer, a biodegradable polymer, or a biodegradable random copolymer, a biodegradable polyester block copolymer, a biodegradable polyester polymer, a biodegradable polyester random copolymer, a linear biodegradable copolymer, PAGA, a biodegradable cross-linked cationic multi-block copolymer or combinations thereof. The biodegradable cationic lipopolymer can be made by methods known in the art and/or described in U.S. Pat. No. 6,696,038, U.S. App. Nos. 20030073619 and 20040142474 each of which is herein incorporated by reference in their entireties. The poly(alkylene imine) can be made using methods known in the art and/or as described in U.S. Pub. No. 20100004315, herein incorporated by reference in its entirety. The biodegradable polymer, biodegradable block copolymer, the biodegradable random copolymer, biodegradable polyester block copolymer, biodegradable polyester polymer, or biodegradable polyester random copolymer can be made using methods known in the art and/or as described in U.S. Pat. Nos. 6,517,869 and 6,267,987, the contents of which are each incorporated herein by reference in their entirety. The linear biodegradable copolymer can be made using methods known in the art and/or as described in U.S. Pat. No. 6,652,886. The PAGA polymer can be made using methods known in the art and/or as described in U.S. Pat. No. 6,217,912 herein incorporated by reference in its entirety. The PAGA polymer can be copolymerized to form a copolymer or block copolymer with polymers such as but not limited to, poly-L-lysine, polyarginine, polyornithine, histones, avidin, protamines, polylactides and poly(lactide-co-glycolides). The biodegradable cross-linked cationic multi-block copolymers can be made my methods known in the art and/or as described in U.S. Pat. Nos. 8,057,821, 8,444,992 or U.S. Pub. No. 2012009145 each of which are herein incorporated by reference in their entireties. For example, the multi-block copolymers can be synthesized using linear polyethyleneimine (LPEI) blocks that have distinct patterns as compared to branched polyethyleneimines. Further, the composition or pharmaceutical composition can be made by the methods known in the art, described herein, or as described in U.S. Pub. No. 20100004315 or U.S. Pat. Nos. 6,267,987 and 6,217,912 each of which are herein incorporated by reference in their entireties.

[1268] The polynucleotides of the disclosure can be formulated with at least one degradable polyester that can contain polycationic side chains. Degradable polyesters include, but are not limited to, poly(serine ester), poly(L-lactide-co-L-lysine), poly(4-hydroxy-L-proline ester), and combinations thereof. In another embodiment, the degradable polyesters can include a PEG conjugation to form a PEGylated polymer.

[1269] The polynucleotides of the disclosure can be formulated with at least one crosslinkable polyester. Crosslinkable polyesters include those known in the art and described in US Pub. No. 20120269761, the contents of which is herein incorporated by reference in its entirety.

[1270] The polynucleotides of the disclosure can be formulated in or with at least one cyclodextrin polymer. Cyclodextrin polymers and methods of making cyclodextrin polymers include those known in the art and described in US Pub. No. 20130184453, the contents of which are herein incorporated by reference in its entirety.

[1271] In some embodiments, the polynucleotides of the disclosure can be formulated in or with at least one crosslinked cation-binding polymers. Crosslinked cation-binding polymers and methods of making crosslinked cation-binding polymers include those known in the art and described in International Patent Publication No. WO2013106072, WO2013106073 and WO2013106086, the contents of each of which are herein incorporated by reference in its entirety.

[1272] In some embodiments, the polynucleotides of the disclosure can be formulated in or with at least one branched polymer. Branched polymers and methods of making branched polymers include those known in the art and described in International Patent Publication No. WO2013113071, the contents of each of which are herein incorporated by reference in its entirety.

[1273] In some embodiments, the polynucleotides of the disclosure can be formulated in or with at least PEGylated albumin polymer. PEGylated albumin polymer and methods of making PEGylated albumin polymer include those known in the art and described in US Patent Publication No. US20130231287, the contents of each of which are herein incorporated by reference in its entirety.

[1274] In some embodiments, the polymers described herein can be conjugated to a lipid-terminating PEG. As a non-limiting example, PLGA can be conjugated to a lipid-terminating PEG forming PLGA-DSPE-PEG. As another non-limiting example, PEG conjugates for use with the present disclosure are described in International Publication No. WO2008103276, herein incorporated by reference in its entirety. The polymers can be conjugated using a ligand conjugate such as, but not limited to, the conjugates described in U.S. Pat. No. 8,273,363, herein incorporated by reference in its entirety.

[1275] In some embodiments, the polynucleotides disclosed herein can be mixed with the PEGs or the sodium phosphate/sodium carbonate solution prior to administration. In another embodiment, a polynucleotides encoding a protein of interest can be mixed with the PEGs and also mixed with the sodium phosphate/sodium carbonate solution. In yet another embodiment, polynucleotides encoding a protein of interest can be mixed with the PEGs and a polynucleotides encoding a second protein of interest can be mixed with the sodium phosphate/sodium carbonate solution.

[1276] In some embodiments, the polynucleotides described herein can be conjugated with another compound. Non-limiting examples of conjugates are described in U.S. Pat. Nos. 7,964,578 and 7,833,992, each of which are herein incorporated by reference in their entireties. In another embodiment, modified RNA of the present disclosure can be conjugated with conjugates of formula 1-122 as described in U.S. Pat. Nos. 7,964,578 and 7,833,992, each of which are herein incorporated by reference in their entireties. The polynucleotides described herein can be conjugated with a metal such as, but not limited to, gold. (See, e.g., Giljohann et al. Journ. Amer. Chem. Soc. 2009 131(6): 2072-2073; herein incorporated by reference in its entirety). In another embodiment, the polynucleotides described herein can be conjugated and/or encapsulated in gold-nanoparticles. (International Pub. No. WO201216269 and U.S. Pub. No. 20120302940 and US20130177523; the contents of each of which is herein incorporated by reference in its entirety).

[1277] As described in U.S. Pub. No. 20100004313, herein incorporated by reference in its entirety, a gene delivery composition can include a nucleotide sequence and a poloxamer. For example, the polynucleotides of the present disclosure can be used in a gene delivery composition with the poloxamer described in U.S. Pub. No. 20100004313.

[1278] In some embodiments, the polymer formulation of the present disclosure can be stabilized by contacting the polymer formulation, which can include a cationic carrier, with a cationic lipopolymer that can be covalently linked to cholesterol and polyethylene glycol groups. The polymer formulation can be contacted with a cationic lipopolymer using the methods described in U.S. Pub. No. 20090042829 herein incorporated by reference in its entirety. The cationic carrier can include, but is not limited to, polyethylenimine, poly(trimethylenimine), poly(tetramethylenimine), polypropylenimine, aminoglycoside-polyamine, dideoxy-diamino-b-cyclodextrin, spermine, spermidine, poly(2-dimethylamino)ethyl methacrylate, poly(lysine), poly(histidine), poly(arginine), cationized gelatin, dendrimers, chitosan, 1,2-Dioleoyl-3-Trimethylammonium-Propane(DOTAP), N-[1-(2,3-dioleoyloxy)propyl]-N,N,N-trimethylammonium chloride (DOTMA), 1-[2-(oleoyloxy)ethyl]-2-oleyl-3-(2-hydroxyethyl)imidazolinium chloride (DOTIM), 2,3-dioleyloxy-N-[2(sperminecarboxamido)ethyl]-N,N-dimethyl-1-propanaminium trifluoroacetate (DOSPA), 3B-[N—(N′,N′-Dimethylaminoethane)-carbamoyl]Cholesterol Hydrochloride (DC-Cholesterol HCl) diheptadecylamidoglycyl spermidine (DOGS), N,N-di stearyl-N,N-dimethylammonium bromide (DDAB), N-(1,2-dimyristyloxyprop-3-yl)-N,N-dimethyl-N-hydroxyethyl ammonium bromide (DMRIE), N,N-dioleyl-N,N-dimethylammonium chloride DODAC) and combinations thereof. As a non-limiting example, the polynucleotides can be formulated with a cationic lipopolymer such as those described in U.S. Patent Application No. 20130065942, herein incorporated by reference in its entirety.

[1279] The polynucleotides of the disclosure can be formulated in a polyplex of one or more polymers (See, e.g., U.S. Pat. No. 8,501,478, U.S. Pub. No. 20120237565 and 20120270927 and 20130149783 and International Patent Pub. No. WO2013090861; the contents of each of which is herein incorporated by reference in its entirety). As a non-limiting example, the polyplex can be formed using the novel alpha-aminoamidine polymers described in International Publication No. WO2013090861, the contents of which are herein incorporated by reference in its entirety. As another non-limiting example, the polyplex can be formed using the click polymers described in U.S. Pat. No. 8,501,478, the contents of which is herein incorporated by reference in its entirety.

[1280] In some embodiments, the polyplex comprises two or more cationic polymers. The cationic polymer can comprise a poly(ethylene imine) (PEI) such as linear PEI. In another embodiment, the polyplex comprises p(TETA/CBA) its PEGylated analog p(TETA/CBA)-g-PEG2k and mixtures thereof (see, e.g., US Patent Publication No. US20130149783, the contents of which are herein incorporated by reference in its entirety.

[1281] The polynucleotides of the disclosure can also be formulated as a nanoparticle using a combination of polymers, lipids, and/or other biodegradable agents, such as, but not limited to, calcium phosphate. Components can be combined in a core-shell, hybrid, and/or layer-by-layer architecture, to allow for fine-tuning of the nanoparticle so to delivery of the polynucleotide, polynucleotides can be enhanced (Wang et al., Nat Mater. 2006 5:791-796; Fuller et al., Biomaterials. 2008 29:1526-1532; DeKoker et al., Adv Drug Deliv Rev. 2011 63:748-761; Endres et al., Biomaterials. 2011 32:7721-7731; Su et al., Mol Pharm. 2011 Jun. 6; 8(3):774-87; herein incorporated by reference in its entirety). As a non-limiting example, the nanoparticle can comprise a plurality of polymers such as, but not limited to hydrophilic-hydrophobic polymers (e.g., PEG-PLGA), hydrophobic polymers (e.g., PEG) and/or hydrophilic polymers (International Pub. No. WO20120225129; the contents of which is herein incorporated by reference in its entirety).

[1282] As another non-limiting example the nanoparticle comprising hydrophilic polymers for the polynucleotides can be those described in or made by the methods described in International Patent Publication No. WO2013119936, the contents of which are herein incorporated by reference in its entirety.

[1283] In some embodiments, the biodegradable polymers that can be used in the present disclosure are poly(ether-anhydride) block copolymers. As a non-limiting example, the biodegradable polymers used herein can be a block copolymer as described in International Patent Publication No WO2006063249, herein incorporated by reference in its entirety, or made by the methods described in International Patent Publication No WO2006063249, herein incorporated by reference in its entirety.

[1284] In another embodiment, the biodegradable polymers that can be used in the present disclosure are alkyl and cycloalkyl terminated biodegradable lipids. As a non-limiting example, the alkyl and cycloalkyl terminated biodegradable lipids can be those described in International Publication No. WO2013086322 and/or made by the methods described in International Publication No. WO2013086322; the contents of which are herein incorporated by reference in its entirety.

[1285] In yet another embodiment, the biodegradable polymers that can be used in the present disclosure are cationic lipids having one or more biodegradable group located in a lipid moiety. As a non-limiting example, the biodegradable lipids can be those described in US Patent Publication No. US20130195920, the contents of which are herein incorporated by reference in its entirety.

[1286] Biodegradable calcium phosphate nanoparticles in combination with lipids and/or polymers have been shown to deliver polynucleotides in vivo. In some embodiments, a lipid coated calcium phosphate nanoparticle, which can also contain a targeting ligand such as anisamide, can be used to deliver the polynucleotide, polynucleotides of the present disclosure. For example, to effectively deliver siRNA in a mouse metastatic lung model a lipid coated calcium phosphate nanoparticle was used (Li et al., J Contr Rel. 2010 142: 416-421; Li et al., J Contr Rel. 2012 158:108-114; Yang et al., Mol Ther. 2012 20:609-615; herein incorporated by reference in its entirety). This delivery system combines both a targeted nanoparticle and a component to enhance the endosomal escape, calcium phosphate, in order to improve delivery of the siRNA.

[1287] In some embodiments, calcium phosphate with a PEG-polyanion block copolymer can be used to delivery polynucleotides (Kazikawa et al., J Contr Rel. 2004 97:345-356; Kazikawa et al., J Contr Rel. 2006 111:368-370; the contents of each of which are herein incorporated by reference in its entirety).

[1288] In some embodiments, a PEG-charge-conversional polymer (Pitella et al., Biomaterials. 2011 32:3106-3114; the contents of which are herein incorporated by reference in its entirety) can be used to form a nanoparticle to deliver the polynucleotides of the present disclosure. The PEG-charge-conversional polymer can improve upon the PEG-polyanion block copolymers by being cleaved into a polycation at acidic pH, thus enhancing endosomal escape.

[1289] In some embodiments, a polymer used in the present disclosure can be a pentablock polymer such as, but not limited to, the pentablock polymers described in International Patent Publication No. WO2013055331, herein incorporated by reference in its entirety. As a non-limiting example, the pentablock polymer comprises PGA-PCL-PEG-PCL-PGA, wherein PEG is polyethylene glycol, PCL is poly(E-caprolactone), PGA is poly(glycolic acid), and PLA is poly(lactic acid). As another non-limiting example, the pentablock polymer comprises PEG-PCL-PLA-PCL-PEG, wherein PEG is polyethylene glycol, PCL is poly(E-caprolactone), PGA is poly(glycolic acid), and PLA is poly(lactic acid).

[1290] In some embodiments, a polymer that can be used in the present disclosure comprises at least one diepoxide and at least one aminoglycoside (See, e.g., International Patent Publication No. WO2013055971, the contents of which are herein incorporated by reference in its entirety). The diepoxide can be selected from, but is not limited to, 1,4 butanediol diglycidyl ether (1,4 B), 1,4-cyclohexanedimethanol diglycidyl ether (1,4 C), 4-vinylcyclohexene diepoxide (4VCD), ethyleneglycol diglycidyl ether (EDGE), glycerol diglycidyl ether (GDE), neopentylglycol diglycidyl ether (NPDGE), poly(ethyleneglycol) diglycidyl ether (PEGDE), poly(propyleneglycol) diglycidyl ether (PPGDE) and resorcinol diglycidyl ether (RDE). The aminoglycoside can be selected from, but is not limited to, streptomycin, neomycin, framycetin, paromomycin, ribostamycin, kanamycin, amikacin, arbekacin, bekanamycin, dibekacin, tobramycin, spectinomycin, hygromycin, gentamicin, netilmicin, sisomicin, isepamicin, verdamicin, astromicin, and apramycin. As a non-limiting example, the polymers can be made by the methods described in International Patent Publication No. WO2013055971, the contents of which are herein incorporated by reference in its entirety. As another non-limiting example, compositions comprising any of the polymers comprising at least one least one diepoxide and at least one aminoglycoside can be made by the methods described in International Patent Publication No. WO2013055971, the contents of which are herein incorporated by reference in its entirety.

[1291] In some embodiments, a polymer that can be used in the present disclosure can be a cross-linked polymer. As a non-limiting example, the cross-linked polymers can be used to form a particle as described in U.S. Pat. No. 8,414,927, the contents of which are herein incorporated by reference in its entirety. As another non-limiting example, the cross-linked polymer can be obtained by the methods described in US Patent Publication No. US20130172600, the contents of which are herein incorporated by reference in its entirety.

[1292] In another embodiment, a polymer that can be used in the present disclosure can be a cross-linked polymer such as those described in U.S. Pat. No. 8,461,132, the contents of which are herein incorporated by reference in its entirety. As a non-limiting example, the cross-linked polymer can be used in a therapeutic composition for the treatment of a body tissue. The therapeutic composition can be administered to damaged tissue using various methods known in the art and/or described herein such as injection or catheterization.

[1293] In some embodiments, a polymer that can be used in the present disclosure can be a di-alphatic substituted pegylated lipid such as, but not limited to, those described in International Patent Publication No. WO2013049328, the contents of which are herein incorporated by reference in its entirety.

[1294] In some embodiments, a block copolymer is PEG-PLGA-PEG (see, e.g., the thermosensitive hydrogel (PEG-PLGA-PEG) was used as a TGF-beta1 gene delivery vehicle in Lee et al. Thermosensitive Hydrogel as a Tgf-β1 Gene Delivery Vehicle Enhances Diabetic Wound Healing. Pharmaceutical Research, 2003 20(12): 1995-2000; as a controlled gene delivery system in Li et al. Controlled Gene Delivery System Based on Thermosensitive Biodegradable Hydrogel. Pharmaceutical Research 2003 20(6):884-888; and Chang et al., Non-ionic amphiphilic biodegradable PEG-PLGA-PEG copolymer enhances gene delivery efficiency in rat skeletal muscle. J Controlled Release. 2007 118:245-253; each of which is herein incorporated by reference in its entirety) can be used in the present disclosure. The present disclosure can be formulated with PEG-PLGA-PEG for administration such as, but not limited to, intramuscular and subcutaneous administration.

[1295] In another embodiment, the PEG-PLGA-PEG block copolymer is used in the present disclosure to develop a biodegradable sustained release system. In one aspect, the polynucleotides of the present disclosure are mixed with the block copolymer prior to administration. In another aspect, the polynucleotides acids of the present disclosure are co-administered with the block copolymer.

[1296] In some embodiments, the polymer used in the present disclosure can be a multi-functional polymer derivative such as, but not limited to, a multi-functional N-maleimidyl polymer derivatives as described in U.S. Pat. No. 8,454,946, the contents of which are herein incorporated by reference in its entirety.

[1297] The use of core-shell nanoparticles has additionally focused on a high-throughput approach to synthesize cationic cross-linked nanogel cores and various shells (Siegwart et al., Proc Natl Acad Sci USA. 2011 108:12996-13001; the contents of which are herein incorporated by reference in its entirety). The complexation, delivery, and internalization of the polymeric nanoparticles can be precisely controlled by altering the chemical composition in both the core and shell components of the nanoparticle. For example, the core-shell nanoparticles can efficiently deliver siRNA to mouse hepatocytes after they covalently attach cholesterol to the nanoparticle.

[1298] In some embodiments, a hollow lipid core comprising a middle PLGA layer and an outer neutral lipid layer containing PEG can be used to delivery of the polynucleotide, polynucleotides of the present disclosure. As a non-limiting example, in mice bearing a luciferease-expressing tumor, it was determined that the lipid-polymer-lipid hybrid nanoparticle significantly suppressed luciferase expression, as compared to a conventional lipoplex (Shi et al, Angew Chem Int Ed. 2011 50:7027-7031; herein incorporated by reference in its entirety).

[1299] In some embodiments, the lipid nanoparticles can comprise a core of the polynucleotides disclosed herein and a polymer shell. The polymer shell can be any of the polymers described herein and are known in the art. In an additional embodiment, the polymer shell can be used to protect the polynucleotides in the core.

[1300] Core-shell nanoparticles for use with the polynucleotides of the present disclosure are described and can be formed by the methods described in U.S. Pat. No. 8,313,777 or International Patent Publication No. WO2013124867, the contents of each of which are herein incorporated by reference in their entirety.

[1301] In some embodiments, the core-shell nanoparticles can comprise a core of the polynucleotides disclosed herein and a polymer shell. The polymer shell can be any of the polymers described herein and are known in the art. In an additional embodiment, the polymer shell can be used to protect the polynucleotides in the core.

[1302] In some embodiments, the polymer used with the formulations described herein can be a modified polymer (such as, but not limited to, a modified polyacetal) as described in International Publication No. WO2011120053, the contents of which are herein incorporated by reference in its entirety.

[1303] In some embodiments, the formulation can be a polymeric carrier cargo complex comprising a polymeric carrier and at least one nucleic acid molecule. Non-limiting examples of polymeric carrier cargo complexes are described in International Patent Publications Nos. WO2013113326, WO2013113501, WO2013113325, WO2013113502 and WO2013113736 and European Patent Publication No. EP2623121, the contents of each of which are herein incorporated by reference in their entireties. In one aspect the polymeric carrier cargo complexes can comprise a negatively charged nucleic acid molecule such as, but not limited to, those described in International Patent Publication Nos. WO2013113325 and WO2013113502, the contents of each of which are herein incorporated by reference in its entirety.

[1304] In some embodiments, a pharmaceutical composition can comprise polynucleotides of the disclosure and a polymeric carrier cargo complex (See, e.g., the antigens described in International Patent Publications Nos. WO2013113326, WO2013113501, WO2013113325, WO2013113502 and WO2013113736 and European Patent Publication No. EP2623121, the contents of each of which are herein incorporated by reference in their entireties).

[1305] In some embodiments, the polymer used with the formulations described herein can be a modified polymer (such as, but not limited to, a modified polyacetal) as described in International Publication No. WO2011120053, the contents of which are herein incorporated by reference in its entirety

### Peptides and Proteins

[1306] The disclosure also includes pharmaceutical compositions that comprise a formulation of the polynucleotide described herein, i.e., a polynucleotide comprising an ORF encoding an MCM polypeptide, using one or more peptides and/or proteins. The polynucleotides of the disclosure can be formulated with peptides and/or proteins in order to increase transfection of cells by the polynucleotide. In some embodiments, peptides such as, but not limited to, proteins and peptides that enable intracellular or mitochondrial delivery can be used to deliver pharmaceutical formulations.

[1307] Formulations of the disclosure including peptides or proteins can be used to increase cell transfection by the polynucleotide, alter the biodistribution of the polynucleotide (e.g., by targeting specific tissues or cell types), and/or increase the translation of encoded protein. (See e.g., International Pub. No. WO2012110636 and WO2013123298; the contents of which are herein incorporated by reference in its entirety).

[1308] In some embodiments, the cell penetrating peptide can be, but is not limited to, those described in US Patent Publication No US20130129726, US20130137644 and US20130164219, each of which is herein incorporated by reference in its entirety.

### Self-Assembled Macromolecules

[1309] The disclosure also includes pharmaceutical compositions that comprise a formulation of the polynucleotide described herein, i.e., a polynucleotide comprising an ORF encoding an MCM polypeptide, with amphiphilic macromolecules (AMs) for delivery. AMs comprise biocompatible amphiphilic polymers that have an alkylated sugar backbone covalently linked to poly(ethylene glycol). In aqueous solution, the AMs self-assemble to form micelles. Non-limiting examples of methods of forming AMs and AMs are described in US Patent Publication No. US20130217753, the contents of which are herein incorporated by reference in its entirety.

### Cations and Anions

[1310] The disclosure also includes pharmaceutical compositions that comprise a formulation of the polynucleotide described herein, i.e., a polynucleotide comprising an ORF encoding an MCM polypeptide, with cations or anions. In some embodiments, the formulations include metal cations such as, but not limited to, Zn2+, Ca2+, Cu2+, Mg+ and combinations thereof. As a non-limiting example, formulations can include polymers and a polynucleotides complexed with a metal cation (see, e.g., U.S. Pat. Nos. 6,265,389 and 6,555,525, each of which is herein incorporated by reference in its entirety).

[1311] In some embodiments, cationic nanoparticles comprising combinations of divalent and monovalent cations can be formulated with polynucleotides. Such nanoparticles can form spontaneously in solution over a given period (e.g., hours, days, etc.). Such nanoparticles do not form in the presence of divalent cations alone or in the presence of monovalent cations alone. The delivery of polynucleotides in cationic nanoparticles or in one or more depot comprising cationic nanoparticles can improve polynucleotide bioavailability by acting as a long-acting depot and/or reducing the rate of degradation by nucleases.

### Suspension Formulations

[1312] The disclosure also includes pharmaceutical compositions that comprise a formulation of the polynucleotide described herein, i.e., a polynucleotide comprising an ORF encoding an MCM polypeptide, in suspensions. In some embodiments, suspension formulations are provided comprising polynucleotides, water immiscible oil depots, surfactants and/or co-surfactants and/or co-solvents. Combinations of oils and surfactants can enable suspension formulation with polynucleotides. Delivery of polynucleotides in a water immiscible depot can be used to improve bioavailability through sustained release of mRNA from the depot to the surrounding physiologic environment and prevent polynucleotides degradation by nucleases.

[1313] In some embodiments, suspension formulations of mRNA can be prepared using combinations of polynucleotides, oil-based solutions and surfactants. Such formulations can be prepared as a two-part system comprising an aqueous phase comprising polynucleotides and an oil-based phase comprising oil and surfactants. Exemplary oils for suspension formulations can include, but are not limited to sesame oil and Miglyol (comprising esters of saturated coconut and palmkernel oil-derived caprylic and capric fatty acids and glycerin or propylene glycol), corn oil, soybean oil, peanut oil, beeswax and/or palm seed oil. Exemplary surfactants can include, but are not limited to Cremophor, polysorbate 20, polysorbate 80, polyethylene glycol, transcutol, Capmul®, labrasol, isopropyl myristate, and/or Span 80. In some embodiments, suspensions can comprise co-solvents including, but not limited to ethanol, glycerol and/or propylene glycol.

[1314] Suspensions can be formed by first preparing polynucleotides formulation comprising an aqueous solution of polynucleotide and an oil-based phase comprising one or more surfactants. Suspension formation occurs as a result of mixing the two phases (aqueous and oil-based). In some embodiments, such a suspension can be delivered to an aqueous phase to form an oil-in-water emulsion. In some embodiments, delivery of a suspension to an aqueous phase results in the formation of an oil-in-water emulsion in which the oil-based phase comprising polynucleotides forms droplets that can range in size from nanometer-sized droplets to micrometer-sized droplets. In some embodiments, specific combinations of oils, surfactants, cosurfactants and/or co-solvents can be utilized to suspend polynucleotides in the oil phase and/or to form oil-in-water emulsions upon delivery into an aqueous environment.

[1315] In some embodiments, suspensions can provide modulation of the release of polynucleotides into the surrounding environment. In such embodiments, polynucleotides release can be modulated by diffusion from a water immiscible depot followed by resolubilization into a surrounding environment (e.g., an aqueous environment).

[1316] In some embodiments, polynucleotides within a water immiscible depot (e.g., suspended within an oil phase) can result in altered polynucleotides stability (e.g., altered degradation by nucleases).

[1317] In some embodiments, polynucleotides can be formulated such that upon injection, an emulsion forms spontaneously (e.g., when delivered to an aqueous phase). Such particle formation can provide a high surface area to volume ratio for release of polynucleotides from an oil phase to an aqueous phase.

[1318] In some embodiments, the polynucleotides can be formulated in a nanoemulsion such as, but not limited to, the nanoemulsions described in U.S. Pat. No. 8,496,945, the contents of which are herein incorporated by reference in its entirety. The nanoemulsions can comprise nanoparticles described herein. As a non-limiting example, the nanoparticles can comprise a liquid hydrophobic core that can be surrounded or coated with a lipid or surfactant layer. The lipid or surfactant layer can comprise at least one membrane-integrating peptide and can also comprise a targeting ligand (see, e.g., U.S. Pat. No. 8,496,945, the contents of which are herein incorporated by reference in its entirety).

### Semi-Solid Compositions

[1319] The disclosure also includes pharmaceutical compositions that comprise a formulation of the polynucleotide described herein, i.e., a polynucleotide comprising an ORF encoding an MCM polypeptide, in semi-solid compositions. In some embodiments, the polynucleotides can be formulated with a hydrophobic matrix to form a semi-solid composition. As a non-limiting example, the semi-solid composition or paste-like composition can be made by the methods described in International Patent Publication No WO201307604, herein incorporated by reference in its entirety. The semi-solid composition can be a sustained release formulation as described in International Patent Publication No WO201307604, herein incorporated by reference in its entirety.

[1320] In another embodiment, the semi-solid composition can further have a micro-porous membrane or a biodegradable polymer formed around the composition (see, e.g., International Patent Publication No WO201307604, herein incorporated by reference in its entirety).

[1321] The semi-solid composition using the polynucleotides of the present disclosure can have the characteristics of the semi-solid mixture as described in International Patent Publication No WO201307604, herein incorporated by reference in its entirety (e.g., a modulus of elasticity of at least 10⁻⁴ N·mm⁻², and/or a viscosity of at least 100 mPa·s).

### Surgical Sealants: Gels and Hydrogels

[1322] The disclosure also includes pharmaceutical compositions that comprise a formulation of the polynucleotide described herein, i.e., a polynucleotide comprising an ORF encoding an MCM polypeptide, with surgical sealants. In some embodiments, the polynucleotides disclosed herein can be encapsulated into any hydrogel known in the art that can form a gel when injected into a subject. Surgical sealants such as gels and hydrogels are described in International Patent Application No. PCT/US2014/027077, the contents of which are herein incorporated by reference in its entirety.

### Conjugates

[1323] The disclosure includes pharmaceutical compositions that comprise conjugates of the polynucleotide described herein, i.e., a polynucleotide comprising an ORF encoding an MCM polypeptide. The polynucleotides of the disclosure include conjugates, such as a polynucleotide covalently linked to a carrier or targeting group, or including two encoding regions that together produce a fusion protein (e.g., bearing a targeting group and therapeutic protein or peptide).

[1324] The conjugates of the disclosure include a naturally occurring substance, such as a protein (e.g., human serum albumin (HSA), low-density lipoprotein (LDL), high-density lipoprotein (HDL), or globulin); an carbohydrate (e.g., a dextran, pullulan, chitin, chitosan, inulin, cyclodextrin or hyaluronic acid); or a lipid. The ligand can also be a recombinant or synthetic molecule, such as a synthetic polymer, e.g., a synthetic polyamino acid, an oligonucleotide (e.g., an aptamer). Examples of polyamino acids include polyamino acid is a polylysine (PLL), poly L-aspartic acid, poly L-glutamic acid, styrene-maleic acid anhydride copolymer, poly(L-lactide-co-glycolied) copolymer, divinyl ether-maleic anhydride copolymer, N-(2-hydroxypropyl)methacrylamide copolymer (HMPA), polyethylene glycol (PEG), polyvinyl alcohol (PVA), polyurethane, poly(2-ethylacryllic acid), N-isopropylacrylamide polymers, or polyphosphazine. Example of polyamines include: polyethylenimine, polylysine (PLL), spermine, spermidine, polyamine, pseudopeptide-polyamine, peptidomimetic polyamine, dendrimer polyamine, arginine, amidine, protamine, cationic lipid, cationic porphyrin, quaternary salt of a polyamine, or an alpha helical peptide.

[1325] In some embodiments, the conjugate of the present disclosure can function as a carrier for the polynucleotides of the present disclosure. The conjugate can comprise a cationic polymer such as, but not limited to, polyamine, polylysine, polyalkylenimine, and polyethylenimine that can be grafted to with poly(ethylene glycol). As a non-limiting example, the conjugate can be similar to the polymeric conjugate and the method of synthesizing the polymeric conjugate described in U.S. Pat. No. 6,586,524 herein incorporated by reference in its entirety.

[1326] A non-limiting example of a method for conjugation to a substrate is described in US Patent Publication No. US20130211249, the contents of which are herein incorporated by reference in its entirety. The method can be used to make a conjugated polymeric particle comprising a polynucleotide.

[1327] The conjugates can also include targeting groups, e.g., a cell or tissue targeting agent, e.g., a lectin, glycoprotein, lipid or protein, e.g., an antibody, that binds to a specified cell type such as a kidney cell. A targeting group can be a thyrotropin, melanotropin, lectin, glycoprotein, surfactant protein A, Mucin carbohydrate, multivalent lactose, multivalent galactose, N-acetyl-galactosamine, N-acetyl-glucosamine multivalent mannose, multivalent fucose, glycosylated polyaminoacids, multivalent galactose, transferrin, bisphosphonate, polyglutamate, polyaspartate, a lipid, cholesterol, a steroid, bile acid, folate, vitamin B12, biotin, an RGD peptide, an RGD peptide mimetic or an aptamer.

[1328] Targeting groups can be proteins, e.g., glycoproteins, or peptides, e.g., molecules having a specific affinity for a co-ligand, or antibodies e.g., an antibody, that binds to a specified cell type such as a cancer cell, endothelial cell, or bone cell. Targeting groups can also include hormones and hormone receptors. They can also include non-peptidic species, such as lipids, lectins, carbohydrates, vitamins, cofactors, multivalent lactose, multivalent galactose, N-acetyl-galactosamine, N-acetyl-glucosamine multivalent mannose, multivalent frucose, or aptamers. The ligand can be, for example, a lipopolysaccharide, or an activator of p38 MAP kinase.

[1329] The targeting group can be any ligand that is capable of targeting a specific receptor. Examples include, without limitation, folate, GalNAc, galactose, mannose, mannose-6P, apatamers, integrin receptor ligands, chemokine receptor ligands, transferrin, biotin, serotonin receptor ligands, PSMA, endothelin, GCPII, somatostatin, LDL, and HDL ligands. In particular embodiments, the targeting group is an aptamer. The aptamer can be unmodified or have any combination of modifications disclosed herein.

[1330] As a non-limiting example, the targeting group can be a glutathione receptor (GR)-binding conjugate for targeted delivery across the blood-central nervous system barrier (See, e.g., US Patent Publication No. US2013021661012, the contents of which are herein incorporated by reference in its entirety.

[1331] In some embodiments, the conjugate of the present disclosure can be a synergistic biomolecule-polymer conjugate. The synergistic biomolecule-polymer conjugate can be long-acting continuous-release system to provide a greater therapeutic efficacy. The synergistic biomolecule-polymer conjugate can be those described in US Patent Publication No. US20130195799, the contents of which are herein incorporated by reference in its entirety.

[1332] In another embodiment, the conjugate that can be used in the present disclosure can be an aptamer conjugate. Non-limiting examples of apatamer conjugates are described in International Patent Publication No. WO2012040524, the contents of which are herein incorporated by reference in its entirety. The aptamer conjugates can be used to provide targeted delivery of formulations comprising polynucleotides.

[1333] In some embodiments, the conjugate that can be used in the present disclosure can be an amine containing polymer conjugate. Non-limiting examples of amine containing polymer conjugate are described in U.S. Pat. No. 8,507,653, the contents of which are herein incorporated by reference in its entirety.

[1334] In some embodiments, pharmaceutical compositions of the present disclosure can include chemical modifications such as, but not limited to, modifications similar to locked nucleic acids.

[1335] Representative U.S. patents that teach the preparation of locked nucleic acid (LNA) such as those from Santaris, include, but are not limited to, the following: U.S. Pat. Nos. 6,268,490; 6,670,461; 6,794,499; 6,998,484; 7,053,207; 7,084,125; and 7,399,845, each of which is herein incorporated by reference in its entirety.

[1336] Representative U.S. patents that teach the preparation of PNA compounds include, but are not limited to, U.S. Pat. Nos. 5,539,082; 5,714,331; and 5,719,262, each of which is herein incorporated by reference. Further teaching of PNA compounds can be found, for example, in Nielsen et al., Science, 1991, 254, 1497-1500.

[1337] Some embodiments featured in the disclosure include polynucleotides with phosphorothioate backbones and oligonucleosides with other modified backbones, and in particular —CH₂—NH—CH₂—, —CH₂—N(CH₃)—O—CH₂—[known as a methylene (methylimino) or MMI backbone], —CH₂—O—N(CH₃)—CH₂—, —CH₂—N(CH₃)—N(CH₃)—CH₂— and —N(CH₃)—CH₂—CH₂—[wherein the native phosphodiester backbone is represented as —O—P(O)₂—O—CH₂—] of the above-referenced U.S. Pat. No. 5,489,677, and the amide backbones of the above-referenced U.S. Pat. No. 5,602,240. In some embodiments, the polynucleotides featured herein have morpholino backbone structures of the above-referenced U.S. Pat. No. 5,034,506.

[1338] Modifications at the 2′ position can also aid in delivery. For example, modifications at the 2′ position are not located in a polypeptide-coding sequence, i.e., not in a translatable region. Modifications at the 2′ position can be located in a 5′UTR, a 3′UTR and/or a tailing region. Modifications at the 2′ position can include one of the following at the 2′ position: H (i.e., 2′-deoxy); F; O—, S—, or N-alkyl; O—, S—, or N-alkenyl; O—, S- or N-alkynyl; or O-alkyl-O-alkyl, wherein the alkyl, alkenyl and alkynyl can be substituted or unsubstituted C₁ to C₁₀ alkyl or C₂ to C₁₀ alkenyl and alkynyl. Exemplary suitable modifications include O[(CH₂)ₙO]ₘCH₃, O(CH₂).ₙOCH₃, O(CH₂)ₙNH₂, O(CH₂)ₙCH₃, O(CH₂)ₙONH₂, and O(CH₂)ₙON[(CH₂)ₙCH₃)]₂, where n and m are from 1 to about 10. In other embodiments, the polynucleotides include one of the following at the 2′ position: C₁ to C₁₀ lower alkyl, substituted lower alkyl, alkaryl, aralkyl, O-alkaryl or O-aralkyl, SH, SCH₃, OCN, Cl, Br, CN, CF₃, OCF₃, SOCH₃, SO₂CH₃, ONO₂, NO₂, N₃, NH₂, heterocycloalkyl, heterocycloalkaryl, aminoalkylamino, polyalkylamino, substituted silyl, an RNA cleaving group, a reporter group, an intercalator, a group for improving the pharmacokinetic properties, or a group for improving the pharmacodynamic properties, and other substituents having similar properties. In some embodiments, the modification includes a 2′-methoxyethoxy (2′-O—CH₂CH₂OCH₃, also known as 2′-O-(2-methoxyethyl) or 2′-MOE) (Martin et al., Helv. Chim. Acta, 1995, 78:486-504) i.e., an alkoxy-alkoxy group. Another exemplary modification is 2′-dimethylaminooxyethoxy, i.e., a O(CH₂)₂ON(CH₃)₂ group, also known as 2′-DMAOE, as described in examples herein below, and 2′-dimethylaminoethoxyethoxy (also known in the art as 2′-O-dimethylaminoethoxyethyl or 2′-DMAEOE), i.e., 2′-O—CH₂—O—CH₂—N(CH₂)₂, also described in examples herein below. Other modifications include 2′-methoxy (2′-OCH₃), 2′-aminopropoxy (2′-OCH₂CH₂CH₂NH₂) and 2′-fluoro (2′-F). Similar modifications can also be made at other positions, particularly the 3′ position of the sugar on the 3′ terminal nucleotide or in 2′-5′ linked dsRNAs and the 5′ position of 5′ terminal nucleotide. Polynucleotides of the disclosure can also have sugar mimetics such as cyclobutyl moieties in place of the pentofuranosyl sugar. Representative U.S. patents that teach the preparation of such modified sugar structures include, but are not limited to, U.S. Pat. Nos. 4,981,957; 5,118,800; 5,319,080; 5,359,044; 5,393,878; 5,446,137; 5,466,786; 5,514,785; 5,519,134; 5,567,811; 5,576,427; 5,591,722; 5,597,909; 5,610,300; 5,627,053; 5,639,873; 5,646,265; 5,658,873; 5,670,633; and 5,700,920; the contents of each of which is herein incorporated by reference in their entirety.

[1339] In still other embodiments, the polynucleotide is covalently conjugated to a cell penetrating polypeptide. The cell-penetrating peptide can also include a signal sequence or a targeting sequence. The conjugates of the disclosure can be designed to have increased stability; increased cell transfection; and/or altered the biodistribution (e.g., targeted to specific tissues or cell types).

[1340] In some embodiments, the polynucleotides can be conjugated to an agent to enhance delivery. As a non-limiting example, the agent can be a monomer or polymer such as a targeting monomer or a polymer having targeting blocks as described in International Publication No. WO2011062965, herein incorporated by reference in its entirety. In another non-limiting example, the agent can be a transport agent covalently coupled to the polynucleotides of the present disclosure (See, e.g., U.S. Pat. Nos. 6,835,393 and 7,374,778, each of which is herein incorporated by reference in its entirety). In yet another non-limiting example, the agent can be a membrane barrier transport enhancing agent such as those described in U.S. Pat. Nos. 7,737,108 and 8,003,129, each of which is herein incorporated by reference in its entirety.

[1341] In another embodiment, polynucleotides can be conjugated to SMARTT POLYMER TECHNOLOGY® (PHASERX®, Inc. Seattle, Wash.).

[1342] In another aspect, the conjugate can be a peptide that selectively directs the nanoparticle to neurons in a tissue or organism. As a non-limiting example, the peptide used can be, but is not limited to, the peptides described in US Patent Publication No US20130129627, herein incorporated by reference in its entirety.

[1343] In yet another aspect, the conjugate can be a peptide that can assist in crossing the blood-brain barrier.

### Nanoparticle Formulations

[1344] Self-Assembled Nanoparticles

[1345] The disclosure also includes pharmaceutical compositions that comprise a formulation of the polynucleotide described herein, i.e., a polynucleotide comprising an ORF encoding an MCM polypeptide, with self-assembled nanoparticles. Nucleic acid self-assembled nanoparticles are described in International Patent Application No. PCT/US2014/027077, the contents of which are herein incorporated by reference in its entirety, such as in paragraphs [000740]-[000743]. Polymer-based self-assembled nanoparticles are described in International Patent Application No. PCT/US2014/027077, the contents of which are herein incorporated by reference in its entirety.

[1346] Nanoparticle Mimics

[1347] The disclosure includes pharmaceutical compositions that comprise a nanoparticle mimic formulation of the polynucleotide described herein, i.e., a polynucleotide comprising an ORF encoding an MCM polypeptide. In some embodiments, the polynucleotides of the disclosure is be encapsulated within and/or absorbed to a nanoparticle mimic. A nanoparticle mimic can mimic the delivery function organisms or particles such as, but not limited to, pathogens, viruses, bacteria, fungus, parasites, prions and cells. As a non-limiting example the polynucleotides of the disclosure can be encapsulated in a non-viron particle that can mimic the delivery function of a virus (see International Pub. No. WO2012006376 and US Patent Publication No. US20130171241 and US20130195968, the contents of each of which are herein incorporated by reference in its entirety).

[1348] Nanotubes

[1349] The disclosure includes pharmaceutical compositions that comprise a nanotube formulation of the polynucleotide described herein, i.e., a polynucleotide comprising an ORF encoding an MCM polypeptide. The polynucleotides of the disclosure can be attached or otherwise bound to at least one nanotube such as, but not limited to, rosette nanotubes, rosette nanotubes having twin bases with a linker, carbon nanotubes and/or single-walled carbon nanotubes, The polynucleotides can be bound to the nanotubes through forces such as, but not limited to, steric, ionic, covalent and/or other forces. Nanotubes and nanotube formulations comprising polynucleotides are described in International Patent Application No. PCT/US2014/027077, the contents of which are herein incorporated by reference in its entirety.

[1350] Inorganic Nanoparticles

[1351] The disclosure also includes pharmaceutical compositions that comprise a formulation of the polynucleotide described herein, i.e., a polynucleotide comprising an ORF encoding an MCM polypeptide, in inorganic nanoparticles. Example methods are provided in U.S. Pat. No. 8,257,745, herein incorporated by reference in its entirety. The inorganic nanoparticles can include, but are not limited to, clay substances that are water swellable. As a non-limiting example, the inorganic nanoparticle can include synthetic smectite clays that are made from simple silicates (See, e.g., U.S. Pat. Nos. 5,585,108 and 8,257,745 each of which are herein incorporated by reference in their entirety).

[1352] In some embodiments, the inorganic nanoparticles can comprise a core of the polynucleotides disclosed herein and a polymer shell. The polymer shell can be any of the polymers described herein and are known in the art. In an additional embodiment, the polymer shell can be used to protect the polynucleotides in the core.

[1353] Semi-Conductive and Metallic Nanoparticles

[1354] The disclosure also includes pharmaceutical compositions that comprise a formulation of the polynucleotide described herein, i.e., a polynucleotide comprising an ORF encoding an MCM polypeptide, with water-dispersible nanoparticles comprising a semiconductive or metallic material (U.S. Pub. No. 20120228565; herein incorporated by reference in its entirety) or formed in a magnetic nanoparticle (U.S. Pub. No. 20120265001 and 20120283503; each of which is herein incorporated by reference in its entirety). The water-dispersible nanoparticles can be hydrophobic nanoparticles or hydrophilic nanoparticles.

[1355] In some embodiments, the semi-conductive and/or metallic nanoparticles can comprise a core of the polynucleotides disclosed herein and a polymer shell. The polymer shell can be any of the polymers described herein and are known in the art. In an additional embodiment, the polymer shell can be used to protect the polynucleotides in the core.

[1356] Molded Nanoparticles and Microparticles

[1357] The disclosure also includes pharmaceutical compositions that comprise a formulation of the polynucleotide described herein, i.e., a polynucleotide comprising an ORF encoding an MCM polypeptide, in nanoparticles and/or microparticles. These nanoparticles and/or microparticles can be molded into any size shape and chemistry. As an example, the nanoparticles and/or microparticles can be made using the PRINT® technology by LIQUIDA TECHNOLOGIES® (Morrisville, N.C.) (See, e.g., International Pub. No. WO2007024323; the contents of which are herein incorporated by reference in its entirety).

[1358] In some embodiments, the molded nanoparticles can comprise a core of the polynucleotides disclosed herein and a polymer shell. The polymer shell can be any of the polymers described herein and are known in the art. In an additional embodiment, the polymer shell can be used to protect the polynucleotides in the core.

[1359] In some embodiments, the polynucleotides of the present disclosure can be formulated in microparticles. The microparticles can contain a core of the polynucleotides and a cortex of a biocompatible and/or biodegradable polymer. As a non-limiting example, the microparticles that can be used with the present disclosure can be those described in U.S. Pat. No. 8,460,709, U.S. Patent Publication No. US20130129830 and International Patent Publication No WO2013075068, each of which is herein incorporated by reference in its entirety. As another non-limiting example, the microparticles can be designed to extend the release of the polynucleotides of the present disclosure over a desired period of time (see, e.g., extended release of a therapeutic protein in U.S. Patent Publication No. US20130129830, herein incorporated by reference in its entirety).

[1360] The microparticle for use with the present disclosure can have a diameter of at least 1 micron to at least 100 microns (e.g., at least 1 micron, at least 5 micron, at least 10 micron, at least 15 micron, at least 20 micron, at least 25 micron, at least 30 micron, at least 35 micron, at least 40 micron, at least 45 micron, at least 50 micron, at least 55 micron, at least 60 micron, at least 65 micron, at least 70 micron, at least 75 micron, at least 80 micron, at least 85 micron, at least 90 micron, at least 95 micron, at least 97 micron, at least 99 micron, and at least 100 micron).

[1361] NanoJackets and NanoLiposomes

[1362] The disclosure also includes pharmaceutical compositions that comprise a formulation of the polynucleotide described herein, i.e., a polynucleotide comprising an ORF encoding an MCM polypeptide, with NanoJackets and NanoLiposomes by Keystone Nano (State College, Pa.). NanoJackets are made of compounds that are naturally found in the body including calcium, phosphate and can also include a small amount of silicates. Nanojackets can range in size from 5 to 50 nm and can be used to deliver hydrophilic and hydrophobic compounds such as, but not limited to, polynucleotides.

[1363] NanoLiposomes are made of lipids such as, but not limited to, lipids that naturally occur in the body. NanoLiposomes can range in size from 60-80 nm and can be used to deliver hydrophilic and hydrophobic compounds such as, but not limited to, polynucleotides. In one aspect, the polynucleotides disclosed herein are formulated in a NanoLiposome such as, but not limited to, Ceramide NanoLiposomes. Cells

[1364] The disclosure also includes cells that comprise a polynucleotide described herein, i.e., a polynucleotide comprising an ORF encoding an MCM polypeptide. The polynucleotides of the disclosure can be transfected ex vivo into cells, which are subsequently transplanted into a subject. As non-limiting examples, the pharmaceutical compositions can include red blood cells to deliver modified RNA to liver and myeloid cells, virosomes to deliver modified RNA in virus-like particles (VLPs), and electroporated cells such as, but not limited to, from MAXCYTE® (Gaithersburg, Md.) and from ERYTECH® (Lyon, France) to deliver modified RNA. Examples of use of red blood cells, viral particles and electroporated cells to deliver payloads other than polynucleotides have been documented (Godfrin et al., Expert Opin Biol Ther. 2012 12:127-133; Fang et al., Expert Opin Biol Ther. 2012 12:385-389; Hu et al., Proc Natl Acad Sci USA. 2011 108:10980-10985; Lund et al., Pharm Res. 2010 27:400-420; Huckriede et al., J Liposome Res. 2007; 17:39-47; Cusi, Hum Vaccin. 2006 2:1-7; de Jonge et al., Gene Ther. 2006 13:400-411; all of which are herein incorporated by reference in its entirety).

[1365] The polynucleotides can be delivered in synthetic VLPs synthesized by the methods described in International Pub No. WO2011085231 and WO2013116656 and US Pub No. 20110171248, the contents of each of which are herein incorporated by reference in their entireties.

[1366] Cell-based formulations of the polynucleotides of the disclosure can be used to ensure cell transfection (e.g., in the cellular carrier), alter the biodistribution of the polynucleotide (e.g., by targeting the cell carrier to specific tissues or cell types), and/or increase the translation of encoded protein.

[1367] A variety of methods are known in the art and suitable for introduction of nucleic acid into a cell, including viral and non-viral mediated techniques. Examples of typical non-viral mediated techniques include, but are not limited to, electroporation, calcium phosphate mediated transfer, nucleofection, sonoporation, heat shock, magnetofection, liposome mediated transfer, microinjection, microprojectile mediated transfer (nanoparticles), cationic polymer mediated transfer (DEAE-dextran, polyethylenimine, polyethylene glycol (PEG) and the like) or cell fusion.

[1368] The technique of sonoporation, or cellular sonication, is the use of sound (e.g., ultrasonic frequencies) for modifying the permeability of the cell plasma membrane. Sonoporation methods are known to those in the art and are used to deliver nucleic acids in vivo (Yoon and Park, Expert Opin Drug Deliv. 2010 7:321-330; Postema and Gilja, Curr Pharm Biotechnol. 2007 8:355-361; Newman and Bettinger, Gene Ther. 2007 14:465-475; all herein incorporated by reference in their entirety). Sonoporation methods are known in the art and are also taught for example as it relates to bacteria in US Patent Publication 20100196983 and as it relates to other cell types in, for example, US Patent Publication 20100009424, each of which are incorporated herein by reference in their entirety.

[1369] Electroporation techniques are also well known in the art and are used to deliver nucleic acids in vivo and clinically (Andre et al., Curr Gene Ther. 2010 10:267-280; Chiarella et al., Curr Gene Ther. 2010 10:281-286; Hojman, Curr Gene Ther. 2010 10:128-138; all herein incorporated by reference in their entirety). Electroporation devices are sold by many companies worldwide including, but not limited to BTX® Instruments (Holliston, Mass.) (e.g., the AgilePulse In Vivo System) and Inovio (Blue Bell, Pa.) (e.g., Inovio SP-5P intramuscular delivery device or the CELLECTRA® 3000 intradermal delivery device). In some embodiments, polynucleotides can be delivered by electroporation.

[1370] In some embodiments, the cells are selected from the group consisting of mammalian cells, bacterial cells, plant, microbial, algal and fungal cells. In some embodiments, the cells are mammalian cells, such as, but not limited to, human, mouse, rat, goat, horse, rabbit, hamster or cow cells. In a further embodiment, the cells can be from an established cell line, including, but not limited to, HeLa, NSO, SP2/0, KEK 293T, Vero, Caco, Caco-2, MDCK, COS-1, COS-7, K562, Jurkat, CHO-K1, DG44, CHOK1SV, CHO-S, Huvec, CV-1, Huh-7, NIH3T3, HEK293, 293, A549, HepG2, IMR-90, MCF-7, U-20S, Per.C6, SF9, SF21 or Chinese Hamster Ovary (CHO) cells.

[1371] In certain embodiments, the cells are fungal cells, such as, but not limited to, Chrysosporium cells, Aspergillus cells, Trichoderma cells, Dictyostelium cells, Candida cells, Saccharomyces cells, Schizosaccharomyces cells, and Penicillium cells.

[1372] In certain embodiments, the cells are bacterial cells such as, but not limited to, E. coli, B. subtilis, or BL21 cells. Primary and secondary cells to be transfected by the methods of the disclosure can be obtained from a variety of tissues and include, but are not limited to, all cell types that can be maintained in culture. For examples, primary and secondary cells that can be transfected by the methods of the disclosure include, but are not limited to, fibroblasts, keratinocytes, epithelial cells (e.g., mammary epithelial cells, intestinal epithelial cells), endothelial cells, glial cells, neural cells, formed elements of the blood (e.g., lymphocytes, bone marrow cells), muscle cells and precursors of these somatic cell types. Primary cells can also be obtained from a donor of the same species or from another species (e.g., mouse, rat, rabbit, cat, dog, pig, cow, bird, sheep, goat, horse).

### Minicells

[1373] The disclosure also includes minicells that comprise a polynucleotide described herein, i.e., a polynucleotide comprising an ORF encoding an MCM polypeptide. In one aspect, the polynucleotides can be formulated in bacterial minicells. As a non-limiting example, bacterial minicells can be those described in International Publication No. WO2013088250 or US Patent Publication No. US20130177499, the contents of each of which are herein incorporated by reference in its entirety.

### Micro-Organs

[1374] The disclosure also includes micro-organs containing a polynucleotide described herein, i.e., a polynucleotide comprising an ORF encoding an MCM polypeptide. The polynucleotides can be contained in a micro-organ that can then express an encoded polypeptide of interest in a long-lasting therapeutic formulation. Micro-organs and formulations thereof are described in International Patent Application No. PCT/US2014/027077, the contents of which are herein incorporated by reference in its entirety.

### Exosomes

[1375] The disclosure also includes pharmaceutical compositions that comprise a formulation of the polynucleotide described herein, i.e., a polynucleotide comprising an ORF encoding an MCM polypeptide, in exosomes. The exosomes can be loaded with at least one polynucleotide and delivered to cells, tissues and/or organisms. As a non-limiting example, the polynucleotides can be loaded in the exosomes described in International Publication No. WO2013084000, herein incorporated by reference in its entirety.

### Pseudovirions

[1376] The disclosure also includes pharmaceutical compositions that comprise a formulation of the polynucleotide described herein, i.e., a polynucleotide comprising an ORF encoding an MCM polypeptide, in in Pseudovirions (e.g., pseudo-virions). As a non-limiting example, the pseudovirions can be those developed and/or are described by Aura Biosciences (Cambridge, Mass.). In one aspect, the pseudovirion can be developed to deliver drugs to keratinocytes and basal membranes (See e.g., US Patent Publication Nos. US20130012450, US20130012566, US21030012426 and US20120207840 and International Publication No. WO2013009717, each of which is herein incorporated by reference in its entirety).

[1377] In some embodiments, the pseudovirion used for delivering the polynucleotides of the present disclosure can be derived from viruses such as, but not limited to, herpes and papillomaviruses (See, e.g., US Patent Publication Nos. US Patent Publication Nos. US20130012450, US20130012566, US21030012426 and US20120207840 and International Publication No. WO2013009717, each of which is herein incorporated by reference in its entirety; and Ma et al. HPV pseudovirions as DNA delivery vehicles. Ther Deliv. 2011: 2(4): 427-430; Kines et al. The initial steps leading to papillomavirus infection occur on the basement membrane prior to cell surface binding. PNAS 2009:106(48), 20458-20463; Roberts et al. Genital transmission of HPV in a mouse model is potentiated by nonoxynol-9 and inhibited by carrageenan. Nature Medicine. 2007:13(7) 857-861; Gordon et al., Targeting the Vaginal Mucosa with Human Papillomavirus Pseudovirion Vaccines delivering SIV DNA. J Immunol. 2012 188(2) 714-723; Cuburu et al., Intravaginal immunization with HPV vectors induces tissue-resident CD8+ T cell responses. The Journal of Clinical Investigation. 2012: 122(12) 4606-4620; Hung et al., Ovarian Cancer Gene Therapy Using HPV-16 Pseudovirion Carrying the HSV-tk Gene. PLoS ONE. 2012: 7(7) e40983; Johnson et al., Role of Heparan Sulfate in Attachment to and Infection of the Murine Female Genital Tract by Human Papillomavirus. J Virology. 2009: 83(5) 2067-2074; each of which is herein incorporated by reference in its entirety).

[1378] The pseudovirion can be a virus-like particle (VLP) prepared by the methods described in US Patent Publication No. US20120015899 and US20130177587 and International Patent Publication No. WO2010047839 WO2013116656, WO2013106525 and WO2013122262, the contents of each of which is herein incorporated by reference in its entirety. In one aspect, the VLP can be, but is not limited to, bacteriophages MS, Qβ, R17, fr, GA, Sp, MI, I, MXI, NL95, AP205, f2, PP7, and the plant viruses Turnip crinkle virus (TCV), Tomato bushy stunt virus (TBSV), Southern bean mosaic virus (SBMV) and members of the genus Bromovirus including Broad bean mottle virus, Brome mosaic virus, Cassia yellow blotch virus, Cowpea chlorotic mottle virus (CCMV), Melandrium yellow fleck virus, and Spring beauty latent virus. In another aspect, the VLP can be derived from the influenza virus as described in US Patent Publication No. US20130177587 or U.S. Pat. No. 8,506,967, the contents of each of which are herein incorporated by reference in its entirety. In yet another aspect, the VLP can comprise a B7-1 and/or B7-2 molecule anchored to a lipid membrane or the exterior of the particle such as described in International Patent Publication No. WO2013116656, the contents of which are herein incorporated by reference in its entirety. In one aspect, the VLP can be derived from norovirus, rotavirus recombinant VP6 protein or double layered VP2/VP6 such as the VLP described in International Patent Publication No. WO2012049366, the contents of which are herein incorporated by reference in its entirety.

[1379] The pseudovirion can be a human papilloma virus-like particle such as, but not limited to, those described in International Publication No. WO2010120266 and US Patent Publication No. US20120171290, each of which is herein incorporated by reference in its entirety and Ma et al. HPV pseudovirions as DNA delivery vehicles. Ther Deliv. 2011: 2(4): 427-430; Kines et al. The initial steps leading to papillomavirus infection occur on the basement membrane prior to cell surface binding. PNAS 2009:106(48), 20458-20463; Roberts et al. Genital transmission of HPV in a mouse model is potentiated by nonoxynol-9 and inhibited by carrageenan. Nature Medicine. 2007:13(7) 857-861; Gordon et al., Targeting the Vaginal Mucosa with Human Papillomavirus Pseudovirion Vaccines delivering SIV DNA. J Immunol. 2012 188(2) 714-723; Cuburu et al., Intravaginal immunization with HPV vectors induces tissue-resident CD8+ T cell responses. The Journal of Clinical Investigation. 2012: 122(12) 4606-4620; Hung et al., Ovarian Cancer Gene Therapy Using HPV-16 Pseudovirion Carrying the HSV-tk Gene. PLoS ONE. 2012: 7(7) e40983; Johnson et al., Role of Heparan Sulfate in Attachment to and Infection of the Murine Female Genital Tract by Human Papillomavirus. J Virology. 2009: 83(5) 2067-2074; each of which is herein incorporated by reference in its entirety.

[1380] In one aspect, the pseudovirions can be virion derived nanoparticles such as, but not limited to, those described in US Patent Publication No. US20130116408 and US20130115247, each of which is herein incorporated by reference in their entirety. The virion derived nanoparticles can be made by the methods described in US Patent Publication No. US20130116408 and US20130115247 or International Patent Publication No. WO2013119877, each of which is herein incorporated by reference in their entirety.

[1381] In some embodiments, the virus-like particle (VLP) can be a self-assembled particle. Non-limiting examples of self-assembled VLPs and methods of making the self-assembled VLPs are described in International Patent Publication No. WO2013122262, the contents of which are herein incorporated by reference in its entirety.

### Silk-Based Delivery

[1382] The disclosure also includes pharmaceutical compositions that are formulated for silk-based delivery of the polynucleotides described herein, i.e., a polynucleotide comprising an ORF encoding an MCM polypeptide. In some embodiments, the polynucleotides can be formulated in a sustained release silk-based delivery system. The silk-based delivery system can be formed by contacting a silk fibroin solution with a therapeutic agent such as, but not limited to, the polynucleotides described herein and/or known in the art. As a non-limiting example, the sustained release silk-based delivery system that can be used in the present disclosure and methods of making such system are described in US Patent Publication No. US20130177611, the contents of which are herein incorporated by reference in its entirety.

### Microparticles

[1383] The disclosure includes pharmaceutical compositions that comprise a microparticle formulation of the polynucleotide described herein, i.e., a polynucleotide comprising an ORF encoding an MCM polypeptide. In some embodiments, formulations comprising polynucleotides can comprise microparticles. The microparticles can comprise a polymer described herein and/or known in the art such as, but not limited to, poly(α-hydroxy acid), a polyhydroxy butyric acid, a polycaprolactone, a polyorthoester and a polyanhydride. The microparticle can have adsorbent surfaces to adsorb biologically active molecules such as polynucleotides. As a non-limiting example microparticles for use with the present disclosure and methods of making microparticles are described in US Patent Publication No. US2013195923 and US20130195898 and U.S. Pat. Nos. 8,309,139 and 8,206,749, the contents of each of which are herein incorporated by reference in its entirety.

[1384] In another embodiment, the formulation can be a microemulsion comprising microparticles and polynucleotides. As a non-limiting example, microemulsions comprising microparticles are described in US Patent Publication No. US2013195923 and US20130195898 and U.S. Pat. Nos. 8,309,139 and 8,206,749, the contents of each of which are herein incorporated by reference in its entirety.

### Microvesicles

[1385] The disclosure includes pharmaceutical compositions that comprise a microvesicle-based formulation of the polynucleotide described herein, i.e., a polynucleotide comprising an ORF encoding an MCM polypeptide. In some embodiments, polynucleotides can be formulated in microvesicles. Non-limiting examples of microvesicles include those described in US Patent Publication No. US20130209544, the contents of which are herein incorporated by reference in its entirety.

[1386] In some embodiments, the microvesicle is an ARRDC1-mediated microvesicles (ARMMs). Non-limiting examples of ARMMs and methods of making ARMMs are described in International Patent Publication No. WO2013119602, the contents of which are herein incorporated by reference in its entirety.

### Interpolyelectrolyte Complexes

[1387] The disclosure also includes pharmaceutical compositions that comprise a formulation of the polynucleotide described herein, i.e., a polynucleotide comprising an ORF encoding an MCM polypeptide, in an interpolyelectrolyte complex. Interpolyelectrolyte complexes are formed when charge-dynamic polymers are complexed with one or more anionic molecules. Non-limiting examples of charge-dynamic polymers and interpolyelectrolyte complexes and methods of making interpolyelectrolyte complexes are described in U.S. Pat. No. 8,524,368, the contents of which is herein incorporated by reference in its entirety.

### Crystalline Polymeric Systems

[1388] The disclosure also includes pharmaceutical compositions that comprise a formulation of the polynucleotide described herein, i.e., a polynucleotide comprising an ORF encoding an MCM polypeptide, in crystalline polymeric systems. Crystalline polymeric systems are polymers with crystalline moieties and/or terminal units comprising crystalline moieties. Non-limiting examples of polymers with crystalline moieties and/or terminal units comprising crystalline moieties termed “CYC polymers,” crystalline polymer systems and methods of making such polymers and systems are described in U.S. Pat. No. 8,524,259, the contents of which are herein incorporated by reference in its entirety.

Cryoprotectants for mRNA

[1389] The disclosure also includes pharmaceutical compositions that comprise a formulation of the polynucleotide described herein, i.e., a polynucleotide comprising an ORF encoding an MCM polypeptide, with cyroprotectants. As used herein, there term “cryoprotectant” refers to one or more agent that when combined with a given substance, helps to reduce or eliminate damage to that substance that occurs upon freezing. In some embodiments, cryoprotectants are combined with polynucleotides in order to stabilize them during freezing. Frozen storage of mRNA between −20° C. and −80° C. can be advantageous for long term (e.g., 36 months) stability of polynucleotide. In some embodiments, cryoprotectants are included in polynucleotide formulations to stabilize polynucleotide through freeze/thaw cycles and under frozen storage conditions. Cryoprotectants of the present disclosure can include, but are not limited to sucrose, trehalose, lactose, glycerol, dextrose, raffinose and/or mannitol. Trehalose is listed by the Food and Drug Administration as being generally regarded as safe (GRAS) and is commonly used in commercial pharmaceutical formulations.

### Bulking Agents

[1390] The disclosure also includes pharmaceutical compositions that comprise a formulation of the polynucleotide described herein, i.e., a polynucleotide comprising an ORF encoding an MCM polypeptide, with bulking agents. As used herein, the term “bulking agent” refers to one or more agents included in formulations to impart a desired consistency to the formulation and/or stabilization of formulation components. In some embodiments, bulking agents are included in lyophilized polynucleotide formulations to yield a “pharmaceutically elegant” cake, stabilizing the lyophilized polynucleotides during long term (e.g., 36 month) storage. Bulking agents of the present disclosure can include, but are not limited to sucrose, trehalose, mannitol, glycine, lactose and/or raffinose. In some embodiments, combinations of cryoprotectants and bulking agents (for example, sucrose/glycine or trehalose/mannitol) can be included to both stabilize polynucleotides during freezing and provide a bulking agent for lyophilization.

[1391] Non-limiting examples of formulations and methods for formulating the polynucleotides of the present disclosure are also provided in International Publication No WO2013090648 filed Dec. 14, 2012, the contents of which are incorporated herein by reference in their entirety.

### Inactive Ingredients

[1392] The disclosure also includes pharmaceutical compositions that comprise a formulation of the polynucleotide described herein, i.e., a polynucleotide comprising an ORF encoding an MCM polypeptide, with at least one excipient that is an inactive ingredient. As used herein, the term “inactive ingredient” refers to one or more inactive agents included in formulations. In some embodiments, all, none or some of the inactive ingredients that can be used in the formulations of the present disclosure can be approved by the US Food and Drug Administration (FDA). A non-exhaustive list of inactive ingredients and the routes of administration the inactive ingredients can be formulated in are described in International Application No. PCT/US2014/027077.

### VII. Method of Use of Polynucleotides

[1393] The polynucleotides of the present disclosure (i.e., a polynucleotide comprising an ORF encoding an MCM polypeptide) can be administered by any route that results in a therapeutically effective outcome. These include, but are not limited to enteral (into the intestine), gastroenteral, epidural (into the dura matter), oral (by way of the mouth), transdermal, peridural, intracerebral (into the cerebrum), intracerebroventricular (into the cerebral ventricles), epicutaneous (application onto the skin), intradermal, (into the skin itself), subcutaneous (under the skin), nasal administration (through the nose), intravenous (into a vein), intravenous bolus, intravenous drip, intraarterial (into an artery), intramuscular (into a muscle), intracardiac (into the heart), intraosseous infusion (into the bone marrow), intrathecal (into the spinal canal), intraperitoneal, (infusion or injection into the peritoneum), intravesical infusion, intravitreal, (through the eye), intracavernous injection (into a pathologic cavity) intracavitary (into the base of the penis), intravaginal administration, intrauterine, extra-amniotic administration, transdermal (diffusion through the intact skin for systemic distribution), transmucosal (diffusion through a mucous membrane), transvaginal, insufflation (snorting), sublingual, sublabial, enema, eye drops (onto the conjunctiva), in ear drops, auricular (in or by way of the ear), buccal (directed toward the cheek), conjunctival, cutaneous, dental (to a tooth or teeth), electro-osmosis, endocervical, endosinusial, endotracheal, extracorporeal, hemodialysis, infiltration, interstitial, intra-abdominal, intra-amniotic, intra-articular, intrabiliary, intrabronchial, intrabursal, intracartilaginous (within a cartilage), intracaudal (within the cauda equine), intracistemal (within the cistema magna cerebellomedularis), intracorneal (within the cornea), dental intracornal, intracoronary (within the coronary arteries), intracorporus cavernosum (within the dilatable spaces of the corporus cavernosa of the penis), intradiscal (within a disc), intraductal (within a duct of a gland), intraduodenal (within the duodenum), intradural (within or beneath the dura), intraepidermal (to the epidermis), intraesophageal (to the esophagus), intragastric (within the stomach), intragingival (within the gingivae), intraileal (within the distal portion of the small intestine), intralesional (within or introduced directly to a localized lesion), intraluminal (within a lumen of a tube), intralymphatic (within the lymph), intramedullary (within the marrow cavity of a bone), intrameningeal (within the meninges), intraocular (within the eye), intraovarian (within the ovary), intrapericardial (within the pericardium), intrapleural (within the pleura), intraprostatic (within the prostate gland), intrapulmonary (within the lungs or its bronchi), intrasinal (within the nasal or periorbital sinuses), intraspinal (within the vertebral column), intrasynovial (within the synovial cavity of a joint), intratendinous (within a tendon), intratesticular (within the testicle), intrathecal (within the cerebrospinal fluid at any level of the cerebrospinal axis), intrathoracic (within the thorax), intratubular (within the tubules of an organ), intratumor (within a tumor), intratympanic (within the aurus media), intravascular (within a vessel or vessels), intraventricular (within a ventricle), iontophoresis (by means of electric current where ions of soluble salts migrate into the tissues of the body), irrigation (to bathe or flush open wounds or body cavities), laryngeal (directly upon the larynx), nasogastric (through the nose and into the stomach), occlusive dressing technique (topical route administration that is then covered by a dressing that occludes the area), ophthalmic (to the external eye), oropharyngeal (directly to the mouth and pharynx), parenteral, percutaneous, periarticular, peridural, perineural, periodontal, rectal, respiratory (within the respiratory tract by inhaling orally or nasally for local or systemic effect), retrobulbar (behind the pons or behind the eyeball), intramyocardial (entering the myocardium), soft tissue, subarachnoid, subconjunctival, submucosal, topical, transplacental (through or across the placenta), transtracheal (through the wall of the trachea), transtympanic (across or through the tympanic cavity), ureteral (to the ureter), urethral (to the urethra), vaginal, caudal block, diagnostic, nerve block, biliary perfusion, cardiac perfusion, photopheresis or spinal. In specific embodiments, compositions can be administered in a way that allows them cross the blood-brain barrier, vascular barrier, or other epithelial barrier. In some embodiments, a formulation for a route of administration can include at least one inactive ingredient.

[1394] The polynucleotides of the present disclosure can be delivered to a cell naked. As used herein in, “naked” refers to delivering polynucleotides free from agents that promote transfection. For example, the polynucleotides delivered to the cell can contain no modifications. The naked polynucleotides can be delivered to the cell using routes of administration known in the art and described herein.

[1395] The polynucleotides of the present disclosure can be formulated, using the methods described herein. The formulations can contain polynucleotides that can be modified and/or unmodified. The formulations can further include, but are not limited to, cell penetration agents, a pharmaceutically acceptable carrier, a delivery agent, a bioerodible or biocompatible polymer, a solvent, and a sustained-release delivery depot. The formulated polynucleotides can be delivered to the cell using routes of administration known in the art and described herein.

[1396] The compositions can also be formulated for direct delivery to an organ or tissue in any of several ways in the art including, but not limited to, direct soaking or bathing, via a catheter, by gels, powder, ointments, creams, gels, lotions, and/or drops, by using substrates such as fabric or biodegradable materials coated or impregnated with the compositions, and the like.

### Parenteral and Injectable Administration

[1397] The present disclosure encompasses the delivery of polynucleotides of the disclosure (i.e., a polynucleotide comprising an ORF encoding an MCM polypeptide) in forms suitable for parenteral and injectable administration. Liquid dosage forms for parenteral administration include, but are not limited to, pharmaceutically acceptable emulsions, microemulsions, solutions, suspensions, syrups, and/or elixirs. In addition to active ingredients, liquid dosage forms can comprise inert diluents commonly used in the art such as, for example, water or other solvents, solubilizing agents and emulsifiers such as ethyl alcohol, isopropyl alcohol, ethyl carbonate, ethyl acetate, benzyl alcohol, benzyl benzoate, propylene glycol, 1,3-butylene glycol, dimethylformamide, oils (in particular, cottonseed, groundnut, corn, germ, olive, castor, and sesame oils), glycerol, tetrahydrofurfuryl alcohol, polyethylene glycols and fatty acid esters of sorbitan, and mixtures thereof. Besides inert diluents, oral compositions can include adjuvants such as wetting agents, emulsifying and suspending agents, sweetening, flavoring, and/or perfuming agents. In certain embodiments for parenteral administration, compositions are mixed with solubilizing agents such as CREMOPHOR®, alcohols, oils, modified oils, glycols, polysorbates, cyclodextrins, polymers, and/or combinations thereof.

[1398] A pharmaceutical composition for parenteral administration can comprise at least one inactive ingredient. Any or none of the inactive ingredients used can have been approved by the US Food and Drug Administration (FDA). A non-exhaustive list of inactive ingredients for use in pharmaceutical compositions for parenteral administration includes hydrochloric acid, mannitol, nitrogen, sodium acetate, sodium chloride and sodium hydroxide.

[1399] Injectable preparations, for example, sterile injectable aqueous or oleaginous suspensions can be formulated according to the known art using suitable dispersing agents, wetting agents, and/or suspending agents. Sterile injectable preparations can be sterile injectable solutions, suspensions, and/or emulsions in nontoxic parenterally acceptable diluents and/or solvents, for example, as a solution in 1,3-butanediol. Among the acceptable vehicles and solvents that can be employed are water, Ringer's solution, U.S.P., and isotonic sodium chloride solution. Sterile, fixed oils are conventionally employed as a solvent or suspending medium. For this purpose any bland fixed oil can be employed including synthetic mono- or diglycerides. Fatty acids such as oleic acid can be used in the preparation of injectables. The sterile formulation can also comprise adjuvants such as local anesthetics, preservatives and buffering agents.

[1400] Injectable formulations can be sterilized, for example, by filtration through a bacterial-retaining filter, and/or by incorporating sterilizing agents in the form of sterile solid compositions that can be dissolved or dispersed in sterile water or other sterile injectable medium prior to use.

[1401] Injectable formulations can be for direct injection into a region of a tissue, organ and/or subject. As a non-limiting example, a tissue, organ and/or subject can be directly injected a formulation by intramyocardial injection into the ischemic region. (See, e.g., Zangi et al. Nature Biotechnology 2013; the contents of which are herein incorporated by reference in its entirety).

[1402] In order to prolong the effect of an active ingredient, it is often desirable to slow the absorption of the active ingredient from subcutaneous or intramuscular injection. This can be accomplished by the use of a liquid suspension of crystalline or amorphous material with poor water solubility. The rate of absorption of the drug then depends upon its rate of dissolution which, in turn, can depend upon crystal size and crystalline form. Alternatively, delayed absorption of a parenterally administered drug form is accomplished by dissolving or suspending the drug in an oil vehicle. Injectable depot forms are made by forming microencapsule matrices of the drug in biodegradable polymers such as polylactide-polyglycolide. Depending upon the ratio of drug to polymer and the nature of the particular polymer employed, the rate of drug release can be controlled. Examples of other biodegradable polymers include poly(orthoesters) and poly(anhydrides). Depot injectable formulations are prepared by entrapping the drug in liposomes or microemulsions that are compatible with body tissues.

### Therapeutic Use

[1403] The polynucleotides of the present disclosure are used in the preparation, manufacture and therapeutic use of polynucleotide molecules comprising an mRNA encoding a methylmalonyl-CoA mutase (MCM) polypeptide. In some embodiments, the polynucleotides of the present disclosure can be used to treat and/or prevent MCM-related diseases, disorders or conditions. Typically, but not exclusively, the polynucleotides of the present disclosure can be used to treat and/or prevent methylmalonic acidemia. In some embodiments, the nucleotides are used in methods for reducing the levels of methylmalonic acid in a subject in need thereof. For instance, one aspect of the disclosure provides a method of alleviating the symptoms of methylmalonic acidemia in a subject via the administration of a composition comprising a polynucleotide encoding MCM to that subject.

[1404] In some embodiments, the polynucleotides of the present disclosure are used to reduce the level of a metabolite associated with methylmalonic acidemia, the method comprising administering to the subject an effective amount of a polynucleotide encoding an MCM polypeptide. In some embodiments, the administration of an effective amount of a polynucleotide reduces the levels of a biomarker of methylmalonic acidemia such as methylmalonic acid, propionyl-carnitine, acetyl-carnitine, propionyl-CoA, D-methylmalonyl-CoA, L-methylmalonyl-CoA, or a combination thereof in a subject. In some embodiments, the administration of the polynucleotide results in reduction in the level of one or more biomarkers of methylmalonic acidemia within a short period of time after administration of the polynucleotide.

[1405] In some embodiments, the administration of the polynucleotide results in expression of methylmalonyl-CoA mutase in cells of the subject. In some embodiments, administering the polynucleotide results in an increase of MCM enzymatic activity in the subject. For example, in some embodiments, the polynucleotides of the present disclosure are used in methods of administering a composition comprising an mRNA encoding MCM to a subject, wherein the method results in an increase of MCM enzymatic activity in at least some cells of a subject. In some embodiments, the administration of a composition comprising an mRNA encoding MCM to a subject results in an increase of MCM enzymatic activity in cells of subject by at least 10%, at least 25%, at least 50%, at least 75%, at least 100%, or by more than 100%. In some embodiments, the administration of a composition comprising an mRNA encoding MCM to a subject results in an increase of MCM enzymatic activity in cells subject to a level at least 10%, at least 20%, at least 30%, at least 40%, at least 50%, at least 60%, at least 70%, at least 80%, at least 90%, or to 100% or more of the activity level expected in a normal subject, e.g., a normal human not suffering from MMA. In some embodiments, the administration of the polynucleotide results in expression of methylmalonyl-CoA mutase in at least some of the cells of a subject that persists for a period of time sufficient to allow significant methylmalonyl-CoA metabolism to occur.

[1406] In some embodiments, the expression of the encoded polypeptide is increased. In some embodiments, the IVT polynucleotide increases MCM expression levels in cells when introduced into those cells, e.g., by 20-50%, at least 20%, at least 25%, at least 30%, at least 35%, at least 40%, at least 45%, or at least 50%.

[1407] In some embodiments, the method or use comprises administering a polynucleotide, e.g., mRNA, comprising an ORF having significant sequence similarity to a polynucleotide selected from the group of SEQ ID NOs: 1-207, 732-765, and 772, wherein the ORF encodes an MCM polypeptide. Other aspects of the present disclosure relate to transplantation of cells containing polynucleotides to a mammalian subject. Administration of cells to mammalian subjects is known to those of ordinary skill in the art, and includes, but is not limited to, local implantation (e.g., topical or subcutaneous administration), organ delivery or systemic injection (e.g., intravenous injection or inhalation), and the formulation of cells in pharmaceutically acceptable carriers. Such compositions containing polynucleotides can be formulated for administration intramuscularly, transarterially, intraperitoneally, intravenously, intranasally, subcutaneously, endoscopically, transdermally, or intrathecally.

[1408] In some embodiments, the composition can be formulated for extended release.

[1409] In some embodiments, the present methods are able to catalyze the conversion of at least 0.1%, 0.5%, 1%, 2%, 2.5%, 5%, 10%, 20%, 25%, 30%, 35% 40%, 45%, 50%, 55%, 60%, 65%, 70%, 75%, 80%, 85% or more of L-methylmalonyl-CoA to succinyl-CoA. In some embodiments, a the methods are able to catalyze the conversion of a range of from 0.1% to 5%, 5% to 25%, 10% to 25%, 10% to 30%, 20% to 40%, 10% to 50%, 20% to 50%, 10% to 75%, 20% to 75%, 30% to 75%, 30% to 85%, or 25% to 100% of L-methylmalonyl-CoA to succinyl-CoA.

[1410] In some embodiments, the methods achieve at least 0.1%, 0.5%, 1%, 2%, 2.5%, 5%, 10%, 20%, 25%, 30%, 35% 40%, 45%, 50%, 55%, 60%, 65%, 70%, 75%, 80%, 85% or more of the enzymatic activity sufficient for the synthesis of AdoCbl. In some embodiments, the methods achieve a range of from 0.1% to 5%, 5% to 25%, 10% to 25%, 10% to 30%, 20% to 40%, 10% to 50%, 20% to 50%, 10% to 75%, 20% to 75%, 30% to 75%, 30% to 85%, or 25% to 100% of the enzymatic activity sufficient for the synthesis of Adenosylcobalamin (AdoCbl).

[1411] In some embodiments, the methods achieve sufficient enzymatic activity to synthesize at least 0.1%, 0.5%, 1%, 2%, 2.5%, 5%, 10%, 20%, 25%, 30%, 35% 40%, 45%, 50%, 55%, 60%, 65%, 70%, 75%, 80%, 85% or more of the active form of Adenosylcobalamin (AdoCbl), found in healthy individuals. In some embodiments, the methods achieve sufficient enzymatic activity to synthesize a range of from 0.1% to 5%, 5% to 25%, 10% to 25%, 10% to 30%, 20% to 40%, 10% to 50%, 20% to 50%, 10% to 75%, 20% to 75%, 30% to 75%, 30% to 85%, or 25% to 100% of the active form of AdoCbl found in healthy individuals.

[1412] In some embodiments, the methods involve the administration of a polynucleotide in combination with another therapy to a patient in need thereof. Such methods can involve administering a polynucleotide prior to, concurrent with, or subsequent to administration of the additional therapy. In some embodiments, such methods have an additive or synergistic effect. In some embodiments, presented herein is a method for treating MMA, comprising administering to a patient in need thereof an effective amount of a polynucleotide (e.g., mRNA) encoding an MCM polypeptide and an effective amount of another therapy. Examples of such other therapies include, but are not limited to, cobalamin supplements, camitine supplements and antibiotics. In another specific embodiment, presented herein is a method for treating MMA, comprising administering to a patient in need thereof an effective amount of a polynucleotide (e.g., mRNA) encoding an MCM polypeptide and maintaining a low-protein diet.

[1413] In some embodiments, the concentration of methylmalonic acid in biological specimens (e.g., blood, plasma, serum, cerebral spinal fluid, urine, or any other biofluids) of a patient is monitored before, during and/or after a course of treatment involving the administration of a polynucleotide (e.g., mRNA) encoding an MCM polypeptide or a pharmaceutical composition thereof to the patient. In some embodiments, the concentration of methylcitrate in biological specimens (e.g., urine, blood, plasma, serum, cerebral spinal fluid, or any other biofluids) of a patient is monitored before, during and/or after a course of treatment involving the administration of a polynucleotide (e.g., mRNA) encoding an MCM polypeptide or a pharmaceutical composition thereof to the patient. In some embodiments, the concentration of propionylcarnitine in biological specimens (e.g., blood, plasma, serum, cerebral spinal fluid, urine, or any other biofluids) of a patient is monitored before, during and/or after a course of treatment involving the administration of a polynucleotide (e.g., mRNA) encoding an MCM polypeptide or a pharmaceutical composition thereof to the patient. In some embodiments, erythrocyte odd long-chain fatty acids (OLCFAs) levels are monitored before, during and/or after a course of treatment involving the administration of a polynucleotide (e.g., mRNA) encoding an MCM polypeptide or a pharmaceutical composition thereof to a patient. In some embodiments, the urinary urea:methylmalonic acid ratio is monitored before, during and/or after a course of treatment involving the administration of a polynucleotide (e.g., mRNA) encoding an MCM polypeptide or a pharmaceutical composition thereof to a patient. The dosage, frequency and/or length of administration of a polynucleotide (e.g., mRNA) encoding an MCM polypeptide or a pharmaceutical composition thereof to a patient may be modified as a result of the concentration of methylmalonic acid, methylcitrate, or propionylcarnitine, erythrocyte odd long-chain fatty acids (OLCFAs) levels, or the urinary urea:methylmalonic acid ratio. Alternatively, changes in one or more of these monitoring parameters (e.g., concentration of methylmalonic acid, methylcitrate, or propionylcarnitine, erythrocyte odd long-chain fatty acids (OLCFAs) levels, or the urinary urea:methylmalonic acid ratio) might indicate that the course of treatment involving the administration of the polynucleotide (e.g., mRNA) encoding an MCM polypeptide or pharmaceutical composition thereof is effective in treating MMA.

[1414] In a specific embodiment, presented herein is a method for treating MMA, comprising: (a) administering to a patient in need thereof one or more doses of a polynucleotide (e.g., mRNA) encoding an MCM polypeptide or a pharmaceutical composition thereof; and (b) monitoring the concentration of methylmalonic acid, methylcitrate, or propionylcarnitine (e.g., detected in biological specimens such as plasma, serum, cerebral spinal fluid, urine, or other biofluids), erythrocyte odd long-chain fatty acids (OLCFAs) levels, or the urinary urea:methylmalonic acid ratio before and/or after step (a). In some embodiments, step (b) comprises monitoring the concentration of methylmalonic acid. In some embodiments, step (b) comprises monitoring the concentration of methylmalonic acid, methylcitrate and/or propionylcarnitine. In some embodiments, the monitoring step (b) is carried out before and/or after a certain number of doses (e.g., 1, 2, 4, 6, 8, 10, 12, 14, 15, or 20 doses, or more doses; or 2 to 4, 2 to 8, 2 to 20 or 2 to 30 doses) or after a certain time period (e.g., 1, 2, 3, 4, 5, 6, or 7 days; or 1, 2, 3, 4, 5, 10, 15, 20, 30, 40, 45, 48, or 50 weeks) of administering the polynucleotide (e.g., mRNA) encoding an MCM polypeptide. In some embodiments, one or more of these monitoring parameters are detected prior to administration of the polynucleotide (e.g., mRNA) encoding an MCM polypeptide or pharmaceutical composition thereof. In some embodiments, a decrease in the concentration of methylmalonic acid, methylcitrate, or propionylcamitine, or a decrease in erythrocyte odd long-chain fatty acids (OLCFAs) levels following administration of the polynucleotide or pharmaceutical composition thereof indicates that the course of treatment is effective for treating MMA. In some embodiments, an increase in the urinary urea:methylmalonic acid ratio following administration of the polynucleotide (e.g., mRNA) encoding an MCM polypeptide or pharmaceutical composition thereof indicates that the course of treatment is effective for treating MMA.

[1415] The concentration of methylmalonic acid, methylcitrate, or propionylcamitine, erythrocyte odd long-chain fatty acids (OLCFAs) levels, or the urinary urea:methylmalonic acid ratio of a patient may be detected by any technique known to one of skill in the art. In some embodiments, the method for detecting the concentration of methylmalonic acid, methylcitrate, or propionylcarnitine in a patient involves obtaining a tissue or fluid sample from the patient and detecting the concentration of methylmalonic acid, methylcitrate, propionylcarnitine or urea in the biological sample (e.g., from plasma serum sample, cerebral spinal fluid, urine, or other biofluids) that has been subjected to certain types of treatment (e.g., centrifugation) and detection by use of, e.g., standard gas chromatography/mass spectroscopy (GC/MS) stable-isotope dilution methods, positive chemical ionization gas chromatography mass spectrometry (CI GC-MS) spectroscopic techniques (e.g., UV spectroscopy) or high pressure liquid chromatography (HPLC).

[1416] In some embodiments, the methods for treating MMA provided herein alleviate or manage one, two or more symptoms associated with MMA. Alleviating or managing one, two or more symptoms of MMA may be used as a clinical endpoint for efficacy of a polynucleotide for treating MMA. In some embodiments, the methods for treating MMA provided herein reduce the duration and/or severity of one or more symptoms associated with MMA. In some embodiments, the methods for treating MMA provided herein inhibit the onset, progression and/or recurrence of one or more symptoms associated with MMA. In some embodiments, the methods for treating MMA provided herein reduce the number of symptoms associated with MMA. In some embodiments, the methods for treating MMA provided herein inhibit or reduce the progression of one or more symptoms associated therewith.

[1417] Symptoms associated with MMA include, but are not limited to: apnea, hyperammonemia, metabolic acidosis, lethargy, vomiting, dehydration, hypotonia, hypoglycemia, repeated yeast infections, renal impairment, mental retardation, developmental delays, seizures, movement disorders, progressive encephalopathy, facial dysmorphism (e.g., high forehead, broad nasal bridge, epicanthal folds, long smooth philtrum, or triangular mouth), stroke, skin lesions (e.g., moniliasis), occasional hepatomegaly, acute onset of choreoathetosis, dystonia, dysphagia, dysarthria, growth problems (e.g., growth failure), kidney disease or failure, tissue damage, feeding problems, cognitive disabilities, metabolic attacks triggered by common infections and reduced glomerular filtration rate (GFR).

[1418] In some embodiments, the methods for treating MMA provided herein reduce or eliminate one, two, or more of the following: metabolic acidosis, developmental delays, movement disorders, metabolic decompensation episodes (e.g., frequency and/or numbers of episodes), skin lesions, hypotonia, seizures, and renal impairment, associated with MMA. In some embodiments, the methods for treating MMA provided herein improve renal function, development, cognitive ability and movement in a patient diagnosed with MMA.

[1419] In some embodiments, the methods for treating MMA provided herein reduce hospitalization (e.g., the frequency or duration of hospitalization) of a patient diagnosed with MMA. In some embodiments, the methods for treating MMA provided herein reduce hospitalization length of a patient diagnosed with MMA. In some embodiments, the methods for treating MMA provided herein decrease the hospitalization rate.

[1420] In some embodiments, the methods provided herein increase the survival of a patient diagnosed with MMA. In some embodiments, the methods for treating MMA provided herein reduce the mortality of subjects diagnosed with MMA. In some embodiments, the methods for treating MMA provided herein increase symptom-free survival of MMA patients. In some embodiments, the methods for treating MMA provided herein do not cure MMA in patients, but prevent the progression or worsening of the disease. In some embodiments, the methods for treating MMA provided herein enhance or improve the therapeutic effect of another therapy.

[1421] In some embodiments, the methods for treating MMA provided herein reduce the concentration of plasma methylmalonic acid in a subject by at least about 5%, 10%, 15%, 20%, 25%, 30%, 35%, 40%, 45%, 50%, 55%, 60%, 65%, 80%, 85%, 90%, 95%, or 100%, or in a range of from 5% to 50%, 10% to 50%, 20% to 50%, 20% to 75%, 25% to 75%, 25% to 90% or 10% to 99% relative to the respective concentration prior to administration of a polynucleotide (e.g., mRNA) encoding an MCM polypeptide, as assessed by methods well known in the art or described herein. In some embodiments, the methods for treating MMA provided herein reduce the concentration of urinary methylmalonic acid in a subject by at least about 5%, 10%, 15%, 20%, 25%, 30%, 35%, 40%, 45%, 50%, 55%, 60%, 65%, 80%, 85%, 90%, 95%, or 100%, or in a range of from 5% to 50%, 10% to 50%, 20% to 50%, 20% to 75%, 25% to 75%, 25% to 90% or 10% to 99% relative to the respective concentration prior to administration of a polynucleotide (e.g., mRNA) encoding an MCM polypeptide, as assessed by methods well known in the art or described herein.

[1422] In some embodiments, the methods for treating MMA provided herein reduce the concentration of a metabolite of methylmalonic acid in a subject by at least about 5%, 10%, 15%, 20%, 25%, 30%, 35%, 40%, 45%, 50%, 55%, 60%, 65%, 80%, 85%, 90%, 95%, or 100%, or in a range of from 5% to 50%, 10% to 50%, 20% to 50%, 20% to 75%, 25% to 75%, 25% to 90% or 10% to 99% relative to the respective concentration prior to administration of a polynucleotide (e.g., mRNA) encoding an MCM polypeptide, as assessed by methods well known in the art or described herein. In some embodiments, the methods for treating MMA provided herein reduce the concentration of plasma propionylcamitine in a subject by at least about 5%, 10%, 15%, 20%, 25%, 30%, 35%, 40%, 45%, 50%, 55%, 60%, 65%, 80%, 85%, 90%, 95%, or 100%, or in a range of from 5% to 50%, 10% to 50%, 20% to 50%, 20% to 75%, 25% to 75%, 25% to 90% or 10% to 99% relative to the respective concentration prior to administration of a polynucleotide (e.g., mRNA) encoding an MCM polypeptide, as assessed by methods well known in the art or described herein. In some embodiments, the methods for treating MMA provided herein reduce the concentration of urinary methylcitrate in a subject by at least about 5%, 10%, 15%, 20%, 25%, 30%, 35%, 40%, 45%, 50%, 55%, 60%, 65%, 80%, 85%, 90%, 95%, or 100%, or in a range of from 10% to 50%, 20% to 50%, 20% to 75%, 25% to 75%, 25% to 90% or 10% to 99% relative to the respective concentration prior to administration of a polynucleotide (e.g., mRNA) encoding an MCM polypeptide, as assessed by methods well known in the art or described herein.

[1423] In some embodiments, the methods for treating MMA provided herein reduce the erythrocyte odd-numbered long-chain fatty acids levels in a subject by at least about 5%, 10%, 15%, 20%, 25%, 30%, 35%, 40%, 45%, 50%, 55%, 60%, 65%, 80%, 85%, 90%, 95%, or 100%, or in a range of from 10% to 50%, 20% to 50%, 20% to 75%, 25% to 75%, 25% to 90% or 10% to 99% relative to the respective concentration prior to administration of a polynucleotide (e.g., mRNA) encoding an MCM polypeptide, as assessed by methods well known in the art or described herein. In some embodiments, the methods for treating MMA provided herein increase the urinary urea:methylmalonic acid ratio in a subject by at least about 5%, 10%, 15%, 20%, 25%, 30%, 35%, 40%, 45%, 50%, 55%, 60%, 65%, 80%, 85%, 90%, 95%, or 100%, or in a range of from 10% to 50%, 20% to 50%, 20% to 75%, 25% to 75%, 25% to 90% or 10% to 99% relative to the respective concentration prior to administration of a polynucleotide (e.g., mRNA) encoding an MCM polypeptide, as assessed by methods well known in the art or described herein.

[1424] In some embodiments, the methods for treating MMA provided herein increase the cellular enzyme activity in a subject by at least about 5%, 10%, 15%, 20%, 25%, 30%, 35%, 40%, 45%, 50%, 55%, 60%, 65%, 80%, 85%, 90%, 95%, or 100%, or in a range of from 10% to 50%, 20% to 50%, 20% to 75%, 25% to 75%, 25% to 90% or 10% to 99% relative to the respective concentration prior to administration of a polynucleotide (e.g., mRNA) encoding an MCM polypeptide, as assessed by methods well known in the art or described herein. In certain embodiment, the increase in cellular enzyme activity is determined by obtaining cells (e.g., fibroblasts or lymphocytes) from the subject, culturing the cells in the presence or absence of a polynucleotide, and comparing the cellular enzyme activity in the presence of the polynucleotide (e.g., mRNA) encoding an MCM polypeptide to the cellular enzyme activity in the absence of the polynucleotide. Techniques for measuring cellular enzyme activity are known in the art and described herein (see, e.g., Section 6, infra).

[1425] In some aspects, the methods for treating MMA provided herein improve or developmental or cognitive function in a subject. In some aspects, the methods for treating MMA provided herein improve control of muscle contractions by a subject as assessed by methods well known in the art. In some embodiments, the methods for treating MMA provided herein improve renal function In some embodiments, the methods for treating MMA provided herein decrease the need for kidney transplant, liver transplant or both. In some embodiments, the methods for treating MMA provided herein decrease the requirement for hospitalization. In some embodiments, the methods for treating MMA provided herein decrease the length and/or frequency of hospitalization.

[1426] In some embodiments, the subject is a male human. In some embodiments, the subject is a female human. In some embodiments, a subject treated for MMA in accordance with the methods provided herein is a fetus. In accordance with this embodiment, a pregnant female may be administered a polynucleotide in a manner that permits the polynucleotide to pass through the placenta to the fetus. Alternatively, the polynucleotide may be administered directly to the fetus by, e.g., injection. In some embodiments, a subject treated for MMA in accordance with the methods provided herein is a human infant. In one embodiment, a subject treated for MMA in accordance with the methods provided herein is an elderly human. In another embodiment, a subject treated for MMA in accordance with the methods provided herein is a human adult. In another embodiment, a subject treated for MMA in accordance with the methods provided herein is a human child. In another embodiment, a subject treated for MMA in accordance with the methods provided herein is a human toddler.

[1427] In a specific embodiment, a subject treated for MMA in accordance with the methods provided herein is a human that is less than 5 years old. In another specific embodiment, a subject treated for MMA in accordance with the methods provided herein is a human that is older than 5 years old. In a specific embodiment, a subject treated for MMA in accordance with the methods provided herein is a human that is less than 5 years old, is older than 5 years old, is 18 years old or is older than 18 years old.

[1428] In some embodiments, a subject treated for MMA in accordance with the methods provided herein is administered a polynucleotide (e.g., mRNA) encoding an MCM polypeptide or a pharmaceutical composition thereof, or a combination therapy before any adverse effects or intolerance to therapies other than the polynucleotide develops. In some embodiments, a subject treated for MMA in accordance with the methods provided herein is a refractory patient. In a certain embodiment, a refractory patient is an MMA patient that is refractory to a standard therapy (e.g., carnitine or cobalamin supplements).

[1429] In some embodiments, a subject treated for MMA in accordance with the methods provided herein is a human that has proven refractory to therapies other than treatment with a polynucleotide, but is no longer on these therapies. In some embodiments, a subject treated for MMA in accordance with the methods provided herein is a human already receiving one or more conventional MMA therapies, such as camitine supplements, cobalamin supplements, antibiotics, kidney transplant, and/or liver transplant. In some embodiments, a subject treated for MMA in accordance with the methods provided herein is a human on a low-protein diet. In some embodiments, a subject treated for MMA in accordance with the methods provided herein is a human on a diet that avoids substances containing isoleucine, threonine, methionine, and valine.

[1430] In some embodiments, a subject treated for MMA in accordance with the methods provided herein is a human susceptible to adverse reactions to conventional therapies. In some embodiments, a subject treated for MMA in accordance with the methods provided herein is a human that has not received a therapy, e.g., a carnitine supplement, a cobalamin supplement, an antibiotic, a kidney transplant, and/or a liver transplant, prior to the administration of a polynucleotide or a pharmaceutical composition thereof. In some embodiments, a subject treated for MMA in accordance with the methods provided herein is a human that has received a therapy prior to administration of a polynucleotide or a pharmaceutical composition thereof. In some embodiments, a subject treated for MMA in accordance with the methods provided herein is a human that has experienced adverse side effects to the prior therapy or the prior therapy was discontinued due to unacceptable levels of toxicity to the human.

[1431] In some embodiments, a subject treated for MMA in accordance with the methods provided herein is a human diagnosed with a complete (mut⁰) or partial (mut⁻) defect in methylmalonyl-CoA mutase (MCM). The gene encoding MCM is referred to as the MUT gene and is located on chromosome 6p21.1.

### Dosage and Administration

[1432] In accordance with the methods for treating MMA provided herein, a polynucleotide (e.g., mRNA) encoding an MCM polypeptide or a pharmaceutical composition thereof can be administered to a subject in need thereof by a variety of routes in amounts which result in a beneficial or therapeutic effect. A polynucleotide (e.g., mRNA) encoding an MCM polypeptide or pharmaceutical composition thereof may be intravenously administered to a subject in need thereof in accordance with the methods for treating MMA provided herein.

[1433] In accordance with the methods for treating MMA provided herein that involve administration of a polynucleotide (e.g., mRNA) encoding an MCM polypeptide in combination with one or more additional therapies, the polynucleotide (e.g., mRNA) encoding an MCM polypeptide and one or more additional therapies may be administered by the same route or a different route of administration.

[1434] The dosage and frequency of administration of a polynucleotide (e.g., mRNA) encoding an MCM polypeptide or a pharmaceutical composition thereof is administered to a subject in need thereof in accordance with the methods for treating MMA provided herein will be efficacious while minimizing any side effects. The exact dosage and frequency of administration of a polynucleotide (e.g., mRNA) encoding an MCM polypeptide or a pharmaceutical composition thereof can be determined by a practitioner, in light of factors related to the subject that requires treatment. Factors which may be taken into account include the severity of the disease state, general health of the subject, age, weight, and gender of the subject, diet, time and frequency of administration, drug combination(s), reaction sensitivities, and tolerance/response to therapy. The dosage and frequency of administration of a polynucleotide (e.g., mRNA) encoding an MCM polypeptide or a pharmaceutical composition thereof may be adjusted over time to provide sufficient levels of the polynucleotide or to maintain the desired effect.

[1435] In some embodiments, a polynucleotide (e.g., mRNA) encoding an MCM polypeptide or a pharmaceutical composition thereof is administered to a subject in need thereof in accordance with the methods for treating MMA provided herein at a dosage and a frequency of administration that achieves one or more of the following: (i) the reduction or amelioration of the severity of one or more MMA symptoms; (ii) the reduction in the duration of one or more symptoms associated with MMA; (iii) the prevention in the recurrence of a symptom associated with MMA; (iv) the reduction in hospitalization of a subject; (v) a reduction in hospitalization length; (vi) the increase in the survival of a subject; (vii) the enhancement or improvement of the therapeutic effect of another therapy; (viii) an improvement in developmental or cognitive ability; (ix) a decrease in the frequency and/or number of metabolic decompensation episodes; (x) an improvement in control of muscle contraction; (xi) a reduction in mortality; (xii) an increase in the survival rate of patients; (xiii) a decrease in hospitalization rate; (xiv) the prevention of the development or onset of one or more symptoms associated with MMA; (xv) the reduction in the number of symptoms associated with MMA; (xvi) an decrease in the concentration of methylmalonic acid in biological fluids (e.g., plasma or urine); (xvii) a decrease in the concentration of metabolites of methylmalonic acid, such as propionylcarnitine or methylcitrate, in biological fluids (e.g., plasma or urine); (xviii) a decrease in erythrocyte odd-numbered long-chain fatty acid levels; (xix) an increase in the urinary urea:methylmalonic acid ratio; (xx) an increase in symptom-free survival of MMA patients; (xxi) an improvement in renal function; and (xxii) improvement in quality of life as assessed by methods well known in the art.

[1436] In some embodiments, a polynucleotide (e.g., mRNA) encoding an MCM polypeptide or a pharmaceutical composition thereof is administered to a subject in need thereof in accordance with the methods for treating MMA provided herein once in a day. In some embodiments, a polynucleotide (e.g., mRNA) encoding an MCM polypeptide or a pharmaceutical composition thereof is administered to a subject in need thereof in accordance with the methods for treating MMA provided herein once every two days. In some embodiments, a polynucleotide (e.g., mRNA) encoding an MCM polypeptide or a pharmaceutical composition thereof is administered to a subject in need thereof in accordance with the methods for treating MMA provided herein once every three days. In some embodiments, a polynucleotide (e.g., mRNA) encoding an MCM polypeptide or a pharmaceutical composition thereof is administered to a subject in need thereof in accordance with the methods for treating MMA provided herein once every four days. In some embodiments, a polynucleotide (e.g., mRNA) encoding an MCM polypeptide or a pharmaceutical composition thereof is administered to a subject in need thereof in accordance with the methods for treating MMA provided herein once every five days. In some embodiments, a polynucleotide (e.g., mRNA) encoding an MCM polypeptide or a pharmaceutical composition thereof is administered to a subject in need thereof in accordance with the methods for treating MMA provided herein once every six days. In some embodiments, a polynucleotide (e.g., mRNA) encoding an MCM polypeptide or a pharmaceutical composition thereof is administered to a subject in need thereof in accordance with the methods for treating MMA provided herein once every week. In some embodiments, a polynucleotide (e.g., mRNA) encoding an MCM polypeptide or a pharmaceutical composition thereof is administered to a subject in need thereof in accordance with the methods for treating MMA provided herein once every two weeks. In some embodiments, a polynucleotide (e.g., mRNA) encoding an MCM polypeptide or a pharmaceutical composition thereof is administered to a subject in need thereof in accordance with the methods for treating MMA provided herein once every three weeks. In some embodiments, a polynucleotide (e.g., mRNA) encoding an MCM polypeptide or a pharmaceutical composition thereof is administered to a subject in need thereof in accordance with the methods for treating MMA provided herein once every month. In some embodiments, a polynucleotide (e.g., mRNA) encoding an MCM polypeptide or a pharmaceutical composition thereof is administered to a subject in need thereof in accordance with the methods for treating MMA provided herein on a monthly schedule sufficient to maintain decreased symptoms in a MMA patient suffering therefrom. In some embodiments, provide herein are methods for continuous therapy wherein a polynucleotide (e.g., mRNA) encoding an MCM polypeptide or a pharmaceutical composition thereof is administered to a subject in need thereof in accordance with the methods for treating MMA provided herein daily for a certain period of time. In some embodiments, a polynucleotide (e.g., mRNA) encoding an MCM polypeptide or a pharmaceutical composition thereof is administered continuously in subsequent 24 hour periods daily, weekly, monthly or yearly.

[1437] Treatment periods for a course of therapy can span one week, two weeks, three weeks, four weeks, five weeks, six weeks, seven weeks, eight weeks, nine weeks, ten weeks, eleven weeks, twelve weeks, thirteen weeks, fourteen weeks, four months, five months, six months, seven months, eight months, nine months, ten months, eleven months, one year, two years, three years, four years, five years or longer. The treatment periods can be interrupted by periods of rest which can span a day, one week, two weeks, three weeks, four weeks, five weeks, six weeks, seven weeks, eight weeks, nine weeks, ten weeks, eleven weeks, twelve weeks, thirteen weeks, fourteen weeks, four months, five months, six months, seven months, eight months, nine months, ten months, eleven months, one year, two years, three years, four years, five years or longer. Such determinations can be made by one skilled in the art (e.g., a physician). In some embodiments, treatment is intermittent, with periods of treatment being followed by periods of no treatment. Continuous treatment can be interrupted by one or more days, months, weeks or years. Continuous treatment can also be followed by a rest period lasting one or more days, months, weeks or years, with continuous treatment then resuming after the rest period.

[1438] In a particular embodiment, a polynucleotide or a pharmaceutical composition thereof is administered in a dose of about 0.01-10 mg/kg. In a particular embodiment, a polynucleotide or a pharmaceutical composition thereof is administered in a dose of about 0.01 mg/kg, 0.02 mg/kg, 0.03 mg/kg, 0.04 mg/kg, 0.05 mg/kg, 0.06 mg/kg, 0.07 mg/kg, 0.08, mg/kg, 0.09 mg/kg, 0.1 mg/kg, about 0.2 mg/kg, about 0.3 mg/kg, about 0.4 mg/kg, about 0.5 mg/kg, about 0.6 mg/kg, about 0.7 mg/kg, about 0.8 mg/kg, 0.9 mg/kg, 1.0 mg/kg, about 1.1 mg/kg, 1.2 mg/kg, 1.3 mg/kg, about 1.4 mg/kg, 1.5 mg/kg, 1.6 mg/kg, about 1.7 mg/kg, 1.8 mg/kg, 1.9 mg/kg, about 2.0 mg/kg, 2.1 mg/kg, 2.2 mg/kg, about 2.3 mg/kg, 2.4 mg/kg, 2.5 mg/kg, 3.0 mg/kg, 3.5 mg/kg, 4.0 mg/kg or about 5.0 mg/kg. In a particular embodiment, a polynucleotide or a pharmaceutical composition thereof is administered in a dose of about 0.01-2 mg/kg. In a particular embodiment, a polynucleotide or a pharmaceutical composition thereof is administered in a dose of about 0.02-1 mg/kg. In a particular embodiment, a polynucleotide or a pharmaceutical composition thereof is administered in a dose of about 0.02-1 mg/kg. In a particular embodiment, a polynucleotide or a pharmaceutical composition thereof is administered in a dose of about 0.02-0.5 mg/kg. In a particular embodiment, a polynucleotide or a pharmaceutical composition thereof is administered in a dose of about 0.03-0.5 mg/kg. In a particular embodiment, a polynucleotide or a pharmaceutical composition thereof is administered in a dose of about 0.04-0.5 mg/kg. In a particular embodiment, a polynucleotide or a pharmaceutical composition thereof is administered in a dose of about 0.05-0.5 mg/kg.

[1439] In a particular embodiment, a polynucleotide or a pharmaceutical composition thereof is administered in a dose of about 0.02-0.5 mg/kg. In a particular embodiment, a polynucleotide or a pharmaceutical composition thereof is administered in a dose of about 0.02-0.1 or 0.2 mg/kg. In a particular embodiment, a polynucleotide or a pharmaceutical composition thereof is administered in a dose of about 0.02-0.1 or 0.2 mg/kg. In a particular embodiment, a polynucleotide or a pharmaceutical composition thereof is administered in a dose of about 0.03-0.1 or 0.2 mg/kg. In a particular embodiment, a polynucleotide or a pharmaceutical composition thereof is administered in a dose of about 0.04-0.1 or 0.2 mg/kg. In a particular embodiment, a polynucleotide or a pharmaceutical composition thereof is administered in a dose of about 0.05-0.1 or 0.2 mg/kg.

[1440] In other embodiments, an effective dose for the polynucleotide of the disclosure is 0.1 mg/kg to 1.0 mg/kg, 0.1 mg/kg to 10 mg/kg, 0.1 mg/kg to 2 mg/kg, 0.1 mg/kg to 5 mg/kg, 1 mg/kg to 5 mg/kg, or 1 mg/kg to 3 mg/kg. In some embodiments, the effective dose is sufficient to reduce the plasma MMA level after the administration at least 70%, at least 75%, at least 80%, at least 85%, at least 90%, or at least 95% compared to the plasma MMA level prior to the administration. In other embodiments, the plasma MMA level is reduced about 75% to 85% compared to the plasma MMA level prior to the administration.

[1441] In other embodiments, the effective dose is sufficient to maintain the plasma MMA level after the administration lower than about 5 μmol/L, about 4.5 μmol/L, about 4 μmol/L, about 3.5 μmol/L, about 3 μmol/L, about 2.5 μmol/L, about 2 μmol/L, about 1.5 μmol/L, about 1 μmol/L, about 0.9 μmol/L, about 0.8 μmol/L, about 0.7 μmol/L, about 0.6 μmol/L, about 0.5 μmol/L, about 0.4 μmol/L, about 0.3 μmol/L, or 0.27 μmol/L.

[1442] In certain embodiments, the effective dose is sufficient to maintain the urinary MMA level less than 2000 mmol/mol creatinine, less than 1900 mmol/mol creatinine, less than 1800 mmol/mol creatinine, less than 1700 mmol/mol creatinine, less than 1600 mmol/mol creatinine, less than 1500 mmol/mol creatinine, less than 1400 mmol/mol creatinine, less than 1300 mmol/mol creatinine, less than 1200 mmol/mol creatinine, less than 1100 mmol/mol creatinine, less than 1000 mmol/mol creatinine, 900 mmol/mol creatinine, 800 mmol/mol creatinine, 700 mmol/mol creatinine, 600 mmol/mol creatinine, 500 mmol/mol creatinine, 400 mmol/mol creatinine, 300 mmol/mol creatinine, 200 mmol/mol creatinine, 100 mmol/mol creatinine, 90 mmol/mol creatinine, 80 mmol/mol creatinine, 70 mmol/mol creatinine, 60 mmol/mol creatinine, 50 mmol/mol creatinine, 40 mmol/mol creatinine, 30 mmol/mol creatinine, 20 mmol/mol creatinine, 10 mmol/mol creatinine, 9 mmol/mol creatinine, 8 mmol/mol creatinine, 7 mmol/mol creatinine, 6 mmol/mol creatinine, 5 mmol/mol creatinine, 4 mmol/mol creatinine, 3 mmol/mol creatinine, 2 mmol/mol creatinine, or 1 mmol/mol creatinine.

[1443] In some embodiments, a method for treating MMA presented herein involves the administration to a subject in need thereof of one or more doses of an effective amount of a polynucleotide (e.g., mRNA) encoding an MCM polypeptide or a pharmaceutical composition, wherein the effective amount may or may not be the same for each dose. In some embodiments, a first dose of a polynucleotide or pharmaceutical composition thereof is administered to a subject in need thereof for a first period of time, and subsequently, a second dose of a polynucleotide is administered to the subject for a second period of time. The first dose may be more than the second dose, or the first dose may be less than the second dose. A third dose of a polynucleotide also may be administered to a subject in need thereof for a third period of time.

[1444] The length of time that a subject in need thereof is administered a polynucleotide or a pharmaceutical composition thereof in accordance with the methods for treating MMA presented herein will be the time period that is determined to be efficacious. In some embodiments, a method for treating MMA presented herein involves the administration of a polynucleotide or a pharmaceutical composition thereof for a period of time until the severity and/or number of symptoms associated with MMA decrease.

[1445] It will be understood that the amounts of a polynucleotide or a pharmaceutical composition thereof administered to a patient in need thereof are or can be calculated based upon the actual weight of the patient in question or the average weight of the patient population in question.

### Combination Therapy

[1446] Presented herein are combination therapies for the treatment of MMA which involve the administration of a polynucleotide (e.g., mRNA) encoding an MCM polypeptide in combination with one or more additional therapies to a subject in need thereof. In a specific embodiment, presented herein are combination therapies for the treatment of MMA which involve the administration of an effective amount of a polynucleotide (e.g., mRNA) encoding an MCM polypeptide in combination with an effective amount of another therapy to a subject in need thereof. Specific examples of such other therapies include, but are not limited to, carnitine supplements (such as L-carnitine), cobalamin supplements and antibiotics (such as metronidazole).

[1447] The combination therapies provided herein involve administrating to a subject to in need thereof a polynucleotide or a pharmaceutical composition thereof in combination with conventional, or known, therapies for MMA. Current therapies for MMA, include camitine supplements, cobalamin supplements and antibiotics. Other therapies for MMA or a condition associated therewith are aimed at controlling or relieving symptoms, e.g., anti-seizure medication. Accordingly, in some embodiments, the combination therapies provided herein involve administrating to a subject to in need thereof a pain reliever, a medication for epileptic seizures, or other therapy aimed at alleviating or controlling symptoms associated with MMA or a condition associated therewith.

[1448] In some embodiments, the methods for treating MMA provided herein comprise administering a polynucleotide (e.g., mRNA) encoding an MCM polypeptide as a single agent for a period of time prior to administering the polynucleotide in combination with an additional therapy. In some embodiments, the methods for treating MMA provided herein comprise administering an additional therapy alone for a period of time prior to administering a polynucleotide (e.g., mRNA) encoding an MCM polypeptide in combination with the additional therapy.

[1449] In some embodiments, the administration of a polynucleotide (e.g., mRNA) encoding an MCM polypeptide and one or more additional therapies in accordance with the methods presented herein have an additive effect relative the administration of the polynucleotide or said one or more additional therapies alone. In some embodiments, the administration of a polynucleotide (e.g., mRNA) encoding an MCM polypeptide and one or more additional therapies in accordance with the methods presented herein have a synergistic effect relative to the administration of the polynucleotide or said one or more additional therapies alone.

[1450] The combination of a polynucleotide (e.g., mRNA) encoding an MCM polypeptide and one or more additional therapies can be administered to a subject in the same pharmaceutical composition. Alternatively, a polynucleotide (e.g., mRNA) encoding an MCM polypeptide and one or more additional therapies can be administered concurrently to a subject in separate pharmaceutical compositions. A polynucleotide (e.g., mRNA) encoding an MCM polypeptide and one or more additional therapies can be administered sequentially to a subject in separate pharmaceutical compositions. A polynucleotide (e.g., mRNA) encoding an MCM polypeptide and one or more additional therapies may also be administered to a subject by the same or different routes of administration.

[1451] In some embodiments, the combination therapies provided herein involve administering to a subject in need thereof a polynucleotide (e.g., mRNA) encoding an MCM polypeptide or a pharmaceutical composition thereof in combination with one or more of the following: a camitine supplement (e.g., L-camitine), a cobalamin supplement and an antibiotic. In some embodiments, the combination therapies provided herein involve administering to a subject in need thereof a polynucleotide (e.g., mRNA) encoding an MCM polypeptide or a pharmaceutical composition thereof in combination with an organ transplant (e.g., a kidney, liver or kidney and liver transplant).

### Clinical Objectives

[1452] Efficacy of a polynucleotide for treating MMA may be assessed by determining the effects of the polynucleotide on reduction of plasma methylmalonic acid. The efficacy of a polynucleotide for treating MMA may also be assessed by: (i) determining the effect on urinary levels of methylcitrate; (ii) determining the effect on plasma levels of propionlycarnitine; (iii) evaluating effects on erythrocyte odd long-chain fatty acid levels; (iv) determining effects on the urinary urea:methylmalonic acid ratio; (v) determining the effects on enzyme activity in cultured fibroblasts and lymphocytes from subjects with MMA, (vi) evaluating the effects on the developmental and cognitive ability of subjects; (vii) evaluating the effects on the dystonia rating scale; (viii) evaluating the effects on the occurrence of any metabolic decompensation episodes; (ix) evaluating the safety profile of the polynucleotide; (x) evaluating compliance with treatment with the polynucleotide; and (xi) determining the polynucleotide's plasma exposure over time.

### Clinical Endpoints

[1453] A primary clinical endpoint for efficacy of a polynucleotide for treating MMA includes a reduction in plasma methylmalonic acid levels. Other clinical endpoints for the efficacy of a polynucleotide for treating MMA may include: a reduction in urinary methylmalonic acid levels;

[1454] a reduction in urinary methylcitrate; a reduction in plasma propionylcarnitine; a reduction in erythrocyte odd long-chain fatty acid levels; an increase in the urea:methylmalonic acid ratio;

[1455] and pharmacokinetic parameters, e.g., time to maximum plasma concentration (Tₘₐₓ), Cₘₐₓ, AUC, terminal elimination half-life (t_{1/2}) based on a polynucleotide's plasma concentrations as assessed by a validated bioanalytical method.

[1456] Plasma Methylmalonic Acid Levels

[1457] Plasma methylmalonic acid levels may be used to indicate the effectiveness of a polynucleotide to increase the activity of the relevant enzyme or factor (e.g., MCM). Normal plasma methylmalonic acid level is about <0.27 μmol/L (Fowler et al., 2008, J. Inherit. Metab. Dis. 31: 350-360). Plasma methylmalonic acid levels are elevated in patients with MMA, generally in the range of about 100 to about 1.000 μmol/L in cobalamin-non responsive patients and about 5 to about 100 μmol/L in cobalamin-responsive patients (Venditti, 2007, Gene Reviews). Methylmalonic acid is considered to be nephrotoxic, and central nervous system trapping of methylmalonic acid, propionyl-CoA, and 2 methylcitrate is considered to be the basis for chronic neurologic complications of MMA (Morath et al., 2008, J. Inherit. Metab. Dis. 31: 35-43). A decrease by >30% in plasma or urine methylmalonic acid levels has been considered by some to be a clinically relevant difference (Zwickler et al., 2008, J. Inherit. Metab. Dis. 31: 361-367).

[1458] Blood may be collected and plasma methylmalonic acid concentrations may be determined using a standard gas chromatography/mass spectroscopy (GC/MS) stable-isotope dilution method.

[1459] Urinary Methylmalonic Acid Levels

[1460] Urinary methylmalonic acid levels may be used to indicate the effectiveness of a polynucleotide to increase the activity of the relevant enzyme or factor (e.g., MCM). The normal urinary methylmalonic acid level is <4 mmol/mol creatinine (Venditti, 2007, Gene Reviews), and the level is significantly elevated in MMA. In general, the more severe types of MMA, mut⁰ and cblB, have higher urinary methylmalonic acid levels (about 5,000 to >10.000 mmol/mol creatinine) compared to the less severe types, mut⁻ and cblA (<1,000 to >5,000 mol/mol creatinine) (Horster et al., 2007, Pediatr. Res. 62: 225-230; Fowler et al., 2008, J. Inherit. Metab. Dis. 31: 350-360). It has been observed that chronic renal failure does not occur in patients with urinary methylmalonic acid levels below—2.000 mmol/mol creatinine (Horster et al., 2007, Pediatr. Res. 62: 225-230).

[1461] Urine may be collected and urinary methylmalonic acid concentrations may be determined using a standard gas chromatography/mass spectroscopy (GC/MS) stable-isotope dilution method.

[1462] Plasma Propionylcarnitine, Urinary Methylcitrate, Erythrocyte OLCFAs, Urinary Urea:Methylmalonic Acid Ratio

[1463] Plasma propionylcamitine and urinary methylcitrate are methylmalonic acid metabolites and may be used to indicate the effectiveness of a polynucleotide (e.g., mRNA) encoding an MCM polypeptide to increase the activity of the relevant enzyme or factor (e.g., MCM). It has been suggested that plasma propionylcamitine may be a more useful measurement than urinary methylmalonic acid in the presence of renal insufficiency (Horster et al., 2007, Pediatr. Res. 62: 225-230). Urinary methylcitrate has been found to be elevated in the setting of elevated methylmalonic acid levels (Fowler et al., 2008, J. Inherit. Metab. Dis. 31: 350-360). Blood and urine may be collected and standard techniques may be used to determine plasma propionylcamitine levels and urinary methylcitrate levels, respectively.

[1464] OLCFAs are measured in erythrocyte membrane lipids and may be used to indicate the effectiveness of a polynucleotide (e.g., mRNA) encoding an MCM polypeptide to increase the activity of the relevant enzyme or factor (e.g., MCM). Erythrocyte OLCFAs values reflect both the severity of the disease and the quality of the dietary control in MMA (Merinero et al., 2008, J. Inherit. Metab. Dis. 31: 55-66). This parameter is indicative of the propionyl-CoA load of the cells and of long-term metabolic control in organic acidemias (Merinero et al., 2008, J. Inherit. Metab. Dis. 31: 55-66; Sperl et al., 2000, Eur. J. Pediatr. 159: 54-88). A standard method for determination of erythrocyte OLCFAs concentrations is available.

[1465] An increase in urinary urea:methylmalonic acid ratio following administration of a polynucleotide (e.g., mRNA) encoding an MCM polypeptide compared to baseline may indicate an increase in activity of the deficient enzyme or factor (MCM, cblA, or cblB). Protein catabolism leads to production of both urea and methylmalonic acid. The values of these catabolic products may fluctuate with dietary protein intake. If the source of methylmalonic acid is predominantly natural protein, in patients with no enzyme activity (e.g., mut⁰ patients) the ratio of urinary urea:methylmalonic acid is approximately 3.5. If there is residual enzyme activity (e.g., administration of vitamin B12 to cobalamin-sensitive patients) the ratio is generally >5. Patients receiving amino acid supplements will produce more urea than methylmalonic acid and will have a urea:MMA ratio>5. However, even in this category of patients the urea:MMA ratio will increase if the activity of the deficient enzyme or factor increases, (Valayannopoulos et al., Annual Symposium of the Society for the Study of Inborn Errors of Metabolism, Amsterdam, The Netherlands, September 2004).

### VIII. Kits and Devices

### Kits

[1466] The disclosure provides a variety of kits for conveniently and/or effectively using the claimed nucleotides of the present disclosure. Typically kits will comprise sufficient amounts and/or numbers of components to allow a user to perform multiple treatments of a subject(s) and/or to perform multiple experiments.

[1467] In one aspect, the present disclosure provides kits comprising the molecules (polynucleotides) of the disclosure.

[1468] Said kits can be for protein production, comprising a first polynucleotides comprising a translatable region. The kit can further comprise packaging and instructions and/or a delivery agent to form a formulation composition. The delivery agent can comprise a saline, a buffered solution, a lipidoid or any delivery agent disclosed herein.

[1469] In some embodiments, the buffer solution can include sodium chloride, calcium chloride, phosphate and/or EDTA. In another embodiment, the buffer solution can include, but is not limited to, saline, saline with 2 mM calcium, 5% sucrose, 5% sucrose with 2 mM calcium, 5% Mannitol, 5% Mannitol with 2 mM calcium, Ringer's lactate, sodium chloride, sodium chloride with 2 mM calcium and mannose (See, e.g., U.S. Pub. No. 20120258046; herein incorporated by reference in its entirety). In a further embodiment, the buffer solutions can be precipitated or it can be lyophilized. The amount of each component can be varied to enable consistent, reproducible higher concentration saline or simple buffer formulations. The components can also be varied in order to increase the stability of modified RNA in the buffer solution over a period of time and/or under a variety of conditions. In one aspect, the present disclosure provides kits for protein production, comprising: a polynucleotide comprising a translatable region, provided in an amount effective to produce a desired amount of a protein encoded by the translatable region when introduced into a target cell; a second polynucleotide comprising an inhibitory nucleic acid, provided in an amount effective to substantially inhibit the innate immune response of the cell; and packaging and instructions.

[1470] In one aspect, the present disclosure provides kits for protein production, comprising a polynucleotide comprising a translatable region, wherein the polynucleotide exhibits reduced degradation by a cellular nuclease, and packaging and instructions.

[1471] In one aspect, the present disclosure provides kits for protein production, comprising a polynucleotide comprising a translatable region, wherein the polynucleotide exhibits reduced degradation by a cellular nuclease, and a mammalian cell suitable for translation of the translatable region of the first nucleic acid.

### Devices

[1472] The present disclosure provides for devices that can incorporate polynucleotides that encode polypeptides of interest. These devices contain in a stable formulation the reagents to synthesize a polynucleotide in a formulation available to be immediately delivered to a subject in need thereof, such as a human patient

[1473] Devices for administration can be employed to deliver the polynucleotides of the present disclosure according to single, multi- or split-dosing regimens taught herein. Such devices are taught in, for example, International Application PCT/US2013/30062 filed Mar. 9, 2013, the contents of which are incorporated herein by reference in their entirety.

[1474] Method and devices known in the art for multi-administration to cells, organs and tissues are contemplated for use in conjunction with the methods and compositions disclosed herein as embodiments of the present disclosure. These include, for example, those methods and devices having multiple needles, hybrid devices employing for example lumens or catheters as well as devices utilizing heat, electric current or radiation driven mechanisms.

[1475] According to the present disclosure, these multi-administration devices can be utilized to deliver the single, multi- or split doses contemplated herein. Such devices are taught for example in, International Application PCT/US2013/30062 filed Mar. 9, 2013, the contents of which are incorporated herein by reference in their entirety.

[1476] In some embodiments, the polynucleotide is administered subcutaneously or intramuscularly via at least 3 needles to three different, optionally adjacent, sites simultaneously, or within a 60 minutes period (e.g., administration to 4, 5, 6, 7, 8, 9, or 10 sites simultaneously or within a 60 minute period).

Methods and Devices Utilizing Catheters and/or Lumens

[1477] Methods and devices using catheters and lumens can be employed to administer the polynucleotides of the present disclosure on a single, multi- or split dosing schedule. Such methods and devices are described in International Application PCT/US2013/30062 filed Mar. 9, 2013 (Attorney Docket Number M300), the contents of which are incorporated herein by reference in their entirety.

### Methods and Devices Utilizing Electrical Current

[1478] Methods and devices utilizing electric current can be employed to deliver the polynucleotides of the present disclosure according to the single, multi- or split dosing regimens taught herein. Such methods and devices are described in International Application PCT/US2013/30062 filed Mar. 9, 2013 (Attorney Docket Number M300), the contents of which are incorporated herein by reference in their entirety.

### IX. Definitions

[1479] In order that the present disclosure can be more readily understood, certain terms are first defined. As used in this application, except as otherwise expressly provided herein, each of the following terms shall have the meaning set forth below. Additional definitions are set forth throughout the application.

[1480] The disclosure includes embodiments in which exactly one member of the group is present in, employed in, or otherwise relevant to a given product or process. The disclosure includes embodiments in which more than one, or all of the group members are present in, employed in, or otherwise relevant to a given product or process.

[1481] In this specification and the appended claims, the singular forms “a,” “an” and “the” include plural referents unless the context clearly dictates otherwise. The terms “a” (or “an”), as well as the terms “one or more,” and “at least one” can be used interchangeably herein. In certain aspects, the term “a” or “an” means “single.” In other aspects, the term “a” or “an” includes “two or more” or “multiple.”

[1482] Furthermore, “and/or” where used herein is to be taken as specific disclosure of each of the two specified features or components with or without the other. Thus, the term “and/or” as used in a phrase such as “A and/or B” herein is intended to include “A and B,” “A or B,” “A” (alone), and “B” (alone). Likewise, the term “and/or” as used in a phrase such as “A, B, and/or C” is intended to encompass each of the following aspects: A, B, and C; A, B, or C; A or C; A or B; B or C; A and C; A and B; B and C; A (alone); B (alone); and C (alone).

[1483] Unless defined otherwise, all technical and scientific terms used herein have the same meaning as commonly understood by one of ordinary skill in the art to which this disclosure is related. For example, the Concise Dictionary of Biomedicine and Molecular Biology, Juo, Pei-Show, 2nd ed., 2002, CRC Press; The Dictionary of Cell and Molecular Biology, 3rd ed., 1999, Academic Press; and the Oxford Dictionary Of Biochemistry And Molecular Biology, Revised, 2000, Oxford University Press, provide one of skill with a general dictionary of many of the terms used in this disclosure.

[1484] Wherever aspects are described herein with the language “comprising,” otherwise analogous aspects described in terms of “consisting of” and/or “consisting essentially of” are also provided.

[1485] Units, prefixes, and symbols are denoted in their Système International de Unites (SI) accepted form. Numeric ranges are inclusive of the numbers defining the range. Where a range of values is recited, it is to be understood that each intervening integer value, and each fraction thereof, between the recited upper and lower limits of that range is also specifically disclosed, along with each subrange between such values. The upper and lower limits of any range can independently be included in or excluded from the range, and each range where either, neither or both limits are included is also encompassed within the disclosure. Where a value is explicitly recited, it is to be understood that values that are about the same quantity or amount as the recited value are also within the scope of the disclosure. Where a combination is disclosed, each subcombination of the elements of that combination is also specifically disclosed and is within the scope of the disclosure. Conversely, where different elements or groups of elements are individually disclosed, combinations thereof are also disclosed. Where any element of an disclosure is disclosed as having a plurality of alternatives, examples of that disclosure in which each alternative is excluded singly or in any combination with the other alternatives are also hereby disclosed; more than one element of an disclosure can have such exclusions, and all combinations of elements having such exclusions are hereby disclosed.

[1486] Nucleotides are referred to by their commonly accepted single-letter codes. Unless otherwise indicated, nucleic acids are written left to right in 5′ to 3′ orientation. Nucleotides are referred to herein by their commonly known one-letter symbols recommended by the IUPAC-IUB Biochemical Nomenclature Commission. Accordingly, A represents adenine, C represents cytosine, G represents guanine, T represents thymine, U represents uracil.

[1487] Amino acids are referred to herein by either their commonly known three letter symbols or by the one-letter symbols recommended by the IUPAC-IUB Biochemical Nomenclature Commission. Unless otherwise indicated, amino acid sequences are written left to right in amino to carboxy orientation.

[1488] At various places in the present specification, substituents of compounds of the present disclosure are disclosed in groups or in ranges. It is specifically intended that the present disclosure include each and every individual subcombination of the members of such groups and ranges

[1489] About: As used herein, the term “about” means +/−10% of the recited value.

[1490] Administered in combination: As used herein, the term “administered in combination” or “combined administration” means that two or more agents are administered to a subject at the same time or within an interval such that there can be an overlap of an effect of each agent on the patient. In some embodiments, they are administered within about 60, 30, 15, 10, 5, or 1 minute of one another. In some embodiments, the administrations of the agents are spaced sufficiently closely together such that a combinatorial (e.g., a synergistic) effect is achieved.

[1491] Amino acid substitution: The term “amino acid substitution” refers to replacing an amino acid residue present in a parent sequence (e.g., a consensus sequence) with another amino acid residue. An amino acid can be substituted in a parent sequence, for example, via chemical peptide synthesis or through recombinant methods known in the art. Accordingly, a reference to a “substitution at position X” refers to the substitution of an amino acid present at position X with an alternative amino acid residue. In some aspects, substitution patterns can be described according to the schema AnY, wherein A is the single letter code corresponding to the amino acid naturally present at position n, and Y is the substituting amino acid residue. In other aspects, substitution patterns can be described according to the schema An(YZ), wherein A is the single letter code corresponding to the amino acid residue substituting the amino acid naturally present at position X, and Y and Z are alternative substituting amino acid residue, i.e., In the context of the present disclosure, substitutions (even when they referred to as amino acid substitution) are conducted at the nucleic acid level, i.e., substituting an amino acid residue with an alternative amino acid residue is conducted by substituting the codon encoding the first amino acid with a codon encoding the second amino acid.

[1492] Animal: As used herein, the term “animal” refers to any member of the animal kingdom. In some embodiments, “animal” refers to humans at any stage of development. In some embodiments, “animal” refers to non-human animals at any stage of development. In certain embodiments, the non-human animal is a mammal (e.g., a rodent, a mouse, a rat, a rabbit, a monkey, a dog, a cat, a sheep, cattle, a primate, or a pig). In some embodiments, animals include, but are not limited to, mammals, birds, reptiles, amphibians, fish, and worms. In some embodiments, the animal is a transgenic animal, genetically-engineered animal, or a clone.

[1493] Approximately: As used herein, the term “approximately,” as applied to one or more values of interest, refers to a value that is similar to a stated reference value. In certain embodiments, the term “approximately” refers to a range of values that fall within 25%, 20%, 19%, 18%, 17%, 16%, 15%, 14%, 13%, 12%, 11%, 10%, 9%, 8%, 7%, 6%, 5%, 4%, 3%, 2%, 1%, or less in either direction (greater than or less than) of the stated reference value unless otherwise stated or otherwise evident from the context (except where such number would exceed 100% of a possible value).

[1494] Associated with: As used herein with respect to a disease, the term “associated with” means that the symptom, measurement, characteristic, or status in question is linked to the diagnosis, development, presence, or progression of that disease. As association may, but need not, be causatively linked to the disease.

[1495] When used with respect to two or more moieties, the terms “associated with,” “conjugated,” “linked,” “attached,” and “tethered,” when used with respect to two or more moieties, means that the moieties are physically associated or connected with one another, either directly or via one or more additional moieties that serves as a linking agent, to form a structure that is sufficiently stable so that the moieties remain physically associated under the conditions in which the structure is used, e.g., physiological conditions. An “association” need not be strictly through direct covalent chemical bonding. It can also suggest ionic or hydrogen bonding or a hybridization based connectivity sufficiently stable such that the “associated” entities remain physically associated.

[1496] Bifunctional: As used herein, the term “bifunctional” refers to any substance, molecule or moiety that is capable of or maintains at least two functions. The functions can affect the same outcome or a different outcome. The structure that produces the function can be the same or different. For example, bifunctional modified RNAs of the present disclosure can encode a cytotoxic peptide (a first function) while those nucleosides that comprise the encoding RNA are, in and of themselves, cytotoxic (second function). In this example, delivery of the bifunctional modified RNA to a cancer cell would produce not only a peptide or protein molecule that can ameliorate or treat the cancer but would also deliver a cytotoxic payload of nucleosides to the cell should degradation, instead of translation of the modified RNA, occur.

[1497] Biocompatible: As used herein, the term “biocompatible” means compatible with living cells, tissues, organs or systems posing little to no risk of injury, toxicity or rejection by the immune system.

[1498] Biodegradable: As used herein, the term “biodegradable” means capable of being broken down into innocuous products by the action of living things.

[1499] Biologically active: As used herein, the phrase “biologically active” refers to a characteristic of any substance that has activity in a biological system and/or organism. For instance, a substance that, when administered to an organism, has a biological effect on that organism, is considered to be biologically active. In particular embodiments, a polynucleotide of the present disclosure can be considered biologically active if even a portion of the polynucleotide is biologically active or mimics an activity considered biologically relevant.

[1500] Chimera: As used herein, “chimera” is an entity having two or more incongruous or heterogeneous parts or regions.

[1501] Conservative amino acid substitution: A “conservative amino acid substitution” is one in which the amino acid residue is replaced with an amino acid residue having a similar side chain. Families of amino acid residues having similar side chains have been defined in the art, including basic side chains (e.g., lysine, arginine, or histidine), acidic side chains (e.g., aspartic acid or glutamic acid), uncharged polar side chains (e.g., glycine, asparagine, glutamine, serine, threonine, tyrosine, or cysteine), nonpolar side chains (e.g., alanine, valine, leucine, isoleucine, proline, phenylalanine, methionine, or tryptophan), beta-branched side chains (e.g., threonine, valine, isoleucine) and aromatic side chains (e.g., tyrosine, phenylalanine, tryptophan, or histidine). Thus, if an amino acid in a polypeptide is replaced with another amino acid from the same side chain family, the amino acid substitution is considered to be conservative. In another aspect, a string of amino acids can be conservatively replaced with a structurally similar string that differs in order and/or composition of side chain family members.

[1502] Non-conservative amino acid substitutions include those in which (i) a residue having an electropositive side chain (e.g., Arg, His or Lys) is substituted for, or by, an electronegative residue (e.g., Glu or Asp), (ii) a hydrophilic residue (e.g., Ser or Thr) is substituted for, or by, a hydrophobic residue (e.g., Ala, Leu, Ile, Phe or Val), (iii) a cysteine or proline is substituted for, or by, any other residue, or (iv) a residue having a bulky hydrophobic or aromatic side chain (e.g., Val, His, Ile or Trp) is substituted for, or by, one having a smaller side chain (e.g., Ala or Ser) or no side chain (e.g., Gly).

[1503] Other amino acid substitutions can be readily identified by workers of ordinary skill. For example, for the amino acid alanine, a substitution can be taken from any one of D-alanine, glycine, beta-alanine, L-cysteine and D-cysteine. For lysine, a replacement can be any one of D-lysine, arginine, D-arginine, homo-arginine, methionine, D-methionine, ornithine, or D-ornithine. Generally, substitutions in functionally important regions that can be expected to induce changes in the properties of isolated polypeptides are those in which (i) a polar residue, e.g., serine or threonine, is substituted for (or by) a hydrophobic residue, e.g., leucine, isoleucine, phenylalanine, or alanine; (ii) a cysteine residue is substituted for (or by) any other residue; (iii) a residue having an electropositive side chain, e.g., lysine, arginine or histidine, is substituted for (or by) a residue having an electronegative side chain, e.g., glutamic acid or aspartic acid; or (iv) a residue having a bulky side chain, e.g., phenylalanine, is substituted for (or by) one not having such a side chain, e.g., glycine. The likelihood that one of the foregoing non-conservative substitutions can alter functional properties of the protein is also correlated to the position of the substitution with respect to functionally important regions of the protein: some non-conservative substitutions can accordingly have little or no effect on biological properties.

[1504] Conserved: As used herein, the term “conserved” refers to nucleotides or amino acid residues of a polynucleotide sequence or polypeptide sequence, respectively, that are those that occur unaltered in the same position of two or more sequences being compared. Nucleotides or amino acids that are relatively conserved are those that are conserved amongst more related sequences than nucleotides or amino acids appearing elsewhere in the sequences.

[1505] In some embodiments, two or more sequences are said to be “completely conserved” if they are 100% identical to one another. In some embodiments, two or more sequences are said to be “highly conserved” if they are at least 70% identical, at least 80% identical, at least 90% identical, or at least 95% identical to one another. In some embodiments, two or more sequences are said to be “highly conserved” if they are about 70% identical, about 80% identical, about 90% identical, about 95%, about 98%, or about 99% identical to one another. In some embodiments, two or more sequences are said to be “conserved” if they are at least 30% identical, at least 40% identical, at least 50% identical, at least 60% identical, at least 70% identical, at least 80% identical, at least 90% identical, or at least 95% identical to one another. In some embodiments, two or more sequences are said to be “conserved” if they are about 30% identical, about 40% identical, about 50% identical, about 60% identical, about 70% identical, about 80% identical, about 90% identical, about 95% identical, about 98% identical, or about 99% identical to one another. Conservation of sequence can apply to the entire length of an polynucleotide or polypeptide or can apply to a portion, region or feature thereof.

[1506] Controlled Release: As used herein, the term “controlled release” refers to a pharmaceutical composition or compound release profile that conforms to a particular pattern of release to effect a therapeutic outcome.

[1507] Cyclic or Cyclized: As used herein, the term “cyclic” refers to the presence of a continuous loop. Cyclic molecules need not be circular, only joined to form an unbroken chain of subunits. Cyclic molecules such as the engineered RNA or mRNA of the present disclosure can be single units or multimers or comprise one or more components of a complex or higher order structure.

[1508] Cytotoxic: As used herein, “cytotoxic” refers to killing or causing injurious, toxic, or deadly effect on a cell (e.g., a mammalian cell (e.g., a human cell)), bacterium, virus, fungus, protozoan, parasite, prion, or a combination thereof.

[1509] Delivery: As used herein, “delivery” refers to the act or manner of delivering a compound, substance, entity, moiety, cargo or payload.

[1510] Delivery Agent: As used herein, “delivery agent” refers to any substance that facilitates, at least in part, the in vivo delivery of a polynucleotide to targeted cells.

[1511] Destabilized: As used herein, the term “destable,” “destabilize,” or “destabilizing region” means a region or molecule that is less stable than a starting, wild-type or native form of the same region or molecule.

[1512] Detectable label: As used herein, “detectable label” refers to one or more markers, signals, or moieties that are attached, incorporated or associated with another entity that is readily detected by methods known in the art including radiography, fluorescence, chemiluminescence, enzymatic activity, absorbance and the like. Detectable labels include radioisotopes, fluorophores, chromophores, enzymes, dyes, metal ions, ligands such as biotin, avidin, streptavidin and haptens, quantum dots, and the like. Detectable labels can be located at any position in the peptides or proteins disclosed herein. They can be within the amino acids, the peptides, or proteins, or located at the N- or C-termini.

[1513] Diastereomer: As used herein, the term “diastereomer,” means stereoisomers that are not mirror images of one another and are non-superimposable on one another.

[1514] Digest: As used herein, the term “digest” means to break apart into smaller pieces or components. When referring to polypeptides or proteins, digestion results in the production of peptides.

[1515] Distal: As used herein, the term “distal” means situated away from the center or away from a point or region of interest.

[1516] Dosing regimen: As used herein, a “dosing regimen” is a schedule of administration or physician determined regimen of treatment, prophylaxis, or palliative care.

[1517] Effective Amount: As used herein, the term “effective amount” of an agent is that amount sufficient to effect beneficial or desired results, for example, clinical results, and, as such, an “effective amount” depends upon the context in which it is being applied. The term “effective amount” can be used interchangeably with “effective dose,” “therapeutically effective amount,” or “therapeutically effective dose.”

[1518] Enantiomer: As used herein, the term “enantiomer” means each individual optically active form of a compound of the disclosure, having an optical purity or enantiomeric excess (as determined by methods standard in the art) of at least 80% (i.e., at least 90% of one enantiomer and at most 10% of the other enantiomer), at least 90%, or at least 98%.

[1519] Encapsulate: As used herein, the term “encapsulate” means to enclose, surround or encase.

[1520] Encoded protein cleavage signal: As used herein, “encoded protein cleavage signal” refers to the nucleotide sequence that encodes a protein cleavage signal.

[1521] Engineered: As used herein, embodiments of the disclosure are “engineered” when they are designed to have a feature or property, whether structural or chemical, that varies from a starting point, wild type or native molecule.

[1522] Effective Amount: As used herein, the term “effective amount” of an agent is that amount sufficient to effect beneficial or desired results, for example, clinical results, and, as such, an “effective amount” depends upon the context in which it is being applied. For example, in the context of administering an agent that treats high cholesterol, an effective amount of an agent is, for example, an amount sufficient to achieve treatment, as defined herein, of high cholesterol, as compared to the response obtained without administration of the agent.

[1523] Exosome: As used herein, “exosome” is a vesicle secreted by mammalian cells or a complex involved in RNA degradation.

[1524] Expression: As used herein, “expression” of a nucleic acid sequence refers to one or more of the following events: (1) production of an RNA template from a DNA sequence (e.g., by transcription); (2) processing of an RNA transcript (e.g., by splicing, editing, 5′ cap formation, and/or 3′ end processing); (3) translation of an RNA into a polypeptide or protein; and (4) post-translational modification of a polypeptide or protein.

[1525] Feature: As used herein, a “feature” refers to a characteristic, a property, or a distinctive element.

[1526] Formulation: As used herein, a “formulation” includes at least a polynucleotide and a delivery agent.

[1527] Fragment: A “fragment,” as used herein, refers to a portion. For example, fragments of proteins can comprise polypeptides obtained by digesting full-length protein isolated from cultured cells.

[1528] Functional: As used herein, a “functional” biological molecule is a biological molecule in a form in which it exhibits a property and/or activity by which it is characterized.

[1529] Homology: As used herein, the term “homology” refers to the overall relatedness between polymeric molecules, e.g., between nucleic acid molecules (e.g., DNA molecules and/or RNA molecules) and/or between polypeptide molecules. In some embodiments, polymeric molecules are considered to be “homologous” to one another if their sequences are at least 25%, 30%, 35%, 40%, 45%, 50%, 55%, 60%, 65%, 70%, 75%, 80%, 85%, 90%, 95%, or 99% identical or similar. The term “homologous” necessarily refers to a comparison between at least two sequences (polynucleotide or polypeptide sequences). In accordance with the disclosure, two polynucleotide sequences are considered to be homologous if the polypeptides they encode are at least about 50%, 60%, 70%, 80%, 90%, 95%, or even 99% for at least one stretch of at least about 20 amino acids. In some embodiments, homologous polynucleotide sequences are characterized by the ability to encode a stretch of at least 4-5 uniquely specified amino acids. For polynucleotide sequences less than 60 nucleotides in length, homology is determined by the ability to encode a stretch of at least 4-5 uniquely specified amino acids. In accordance with the disclosure, two protein sequences are considered to be homologous if the proteins are at least about 50%, 60%, 70%, 80%, or 90% identical for at least one stretch of at least about 20 amino acids.

[1530] Identity: As used herein, the term “identity” refers to the overall relatedness between polymeric molecules, e.g., between polynucleotide molecules (e.g., DNA molecules and/or RNA molecules) and/or between polypeptide molecules. Percent identity can be calculated between two DNA molecules, between two RNA molecules, and between a DNA molecule and an RNA molecule. When DNA and RNA are compared, T is considered to be U (or vice versa).

[1531] Calculation of the percent identity of two polynucleotide sequences, for example, can be performed by aligning the two sequences for optimal comparison purposes (e.g., gaps can be introduced in one or both of a first and a second nucleic acid sequences for optimal alignment and non-identical sequences can be disregarded for comparison purposes). In certain embodiments, the length of a sequence aligned for comparison purposes is at least 30%, at least 40%, at least 50%, at least 60%, at least 70%, at least 80%, at least 90%, at least 95%, or 100% of the length of the reference sequence. The nucleotides at corresponding nucleotide positions are then compared. When a position in the first sequence is occupied by the same nucleotide as the corresponding position in the second sequence, then the molecules are identical at that position. The percent identity between the two sequences is a function of the number of identical positions shared by the sequences, taking into account the number of gaps, and the length of each gap, which needs to be introduced for optimal alignment of the two sequences. The comparison of sequences and determination of percent identity between two sequences can be accomplished using a mathematical algorithm. For example, the percent identity between two nucleotide sequences can be determined using methods such as those described in Computational Molecular Biology, Lesk, A. M., ed., Oxford University Press, New York, 1988; Biocomputing: Informatics and Genome Projects, Smith, D. W., ed., Academic Press, New York, 1993; Sequence Analysis in Molecular Biology, von Heinje, G., Academic Press, 1987; Computer Analysis of Sequence Data, Part I, Griffin, A. M., and Griffin, H. G., eds., Humana Press, New Jersey, 1994; and Sequence Analysis Primer, Gribskov, M. and Devereux, J., eds., M Stockton Press, New York, 1991; each of which is incorporated herein by reference. For example, the percent identity between two nucleotide sequences can be determined using the algorithm of Meyers and Miller (CABIOS, 1989, 4:11-17), which has been incorporated into the ALIGN program (version 2.0) using a PAM120 weight residue table, a gap length penalty of 12 and a gap penalty of 4. The percent identity between two nucleotide sequences can, alternatively, be determined using the GAP program in the GCG software package using an NWSgapdna.CMP matrix. Methods commonly employed to determine percent identity between sequences include, but are not limited to those disclosed in Carillo, H., and Lipman, D., SIAM J Applied Math., 48:1073 (1988); incorporated herein by reference. Techniques for determining identity are codified in publicly available computer programs. Exemplary computer software to determine homology between two sequences include, but are not limited to, GCG program package, Devereux, J., et al., Nucleic Acids Research, 12(1), 387 (1984)), BLASTP, BLASTN, and FASTA Altschul, S. F. et al., J. Molec. Biol., 215, 403 (1990)).

[1532] Intact: As used herein, in the context of a polypeptide, the term “intact” means retaining an amino acid corresponding to the wild-type protein, e.g., not mutating or substituting the wild-type amino acid.

[1533] Isomer: As used herein, the term “isomer” means any tautomer, stereoisomer, enantiomer, or diastereomer of any compound of the disclosure. It is recognized that the compounds of the disclosure can have one or more chiral centers and/or double bonds and, therefore, exist as stereoisomers, such as double-bond isomers (i.e., geometric E/Z isomers) or diastereomers (e.g., enantiomers (i.e., (+) or (−)) or cis/trans isomers). According to the disclosure, the chemical structures depicted herein, and therefore the compounds of the disclosure, encompass all of the corresponding stereoisomers, that is, both the stereomerically pure form (e.g., geometrically pure, enantiomerically pure, or diastereomerically pure) and enantiomeric and stereoisomeric mixtures, e.g., racemates. Enantiomeric and stereoisomeric mixtures of compounds of the disclosure can typically be resolved into their component enantiomers or stereoisomers by well-known methods, such as chiral-phase gas chromatography, chiral-phase high performance liquid chromatography, crystallizing the compound as a chiral salt complex, or crystallizing the compound in a chiral solvent. Enantiomers and stereoisomers can also be obtained from stereomerically or enantiomerically pure intermediates, reagents, and catalysts by well-known asymmetric synthetic methods.

[1534] In vitro: As used herein, the term “in vitro” refers to events that occur in an artificial environment, e.g., in a test tube or reaction vessel, in cell culture, in a Petri dish, etc., rather than within an organism (e.g., animal, plant, or microbe).

[1535] In vivo: As used herein, the term “in vivo” refers to events that occur within an organism (e.g., animal, plant, or microbe or cell or tissue thereof).

[1536] Isolated: As used herein, the term “isolated” refers to a substance or entity that has been separated from at least some of the components with which it was associated (whether in nature or in an experimental setting). Isolated substances can have varying levels of purity in reference to the substances from which they have been associated. Isolated substances and/or entities can be separated from at least about 10%, about 20%, about 30%, about 40%, about 50%, about 60%, about 70%, about 80%, about 90%, or more of the other components with which they were initially associated. In some embodiments, isolated agents are more than about 80%, about 85%, about 90%, about 91%, about 92%, about 93%, about 94%, about 95%, about 96%, about 97%, about 98%, about 99%, or more than about 99% pure. As used herein, a substance is “pure” if it is substantially free of other components. Substantially isolated: By “substantially isolated” is meant that the compound is substantially separated from the environment in which it was formed or detected. Partial separation can include, for example, a composition enriched in the compound of the present disclosure. Substantial separation can include compositions containing at least about 50%, at least about 60%, at least about 70%, at least about 80%, at least about 90%, at least about 95%, at least about 97%, or at least about 99% by weight of the compound of the present disclosure, or salt thereof.

[1537] A polynucleotide, vector, polypeptide, cell, or any composition disclosed herein that is “isolated” is a polynucleotide, vector, polypeptide, cell, or composition that is in a form not found in nature. Isolated polynucleotides, vectors, polypeptides, or compositions include those that have been purified to a degree that they are no longer in a form in which they are found in nature. In some aspects, a polynucleotide, vector, polypeptide, or composition that is isolated is substantially pure.

[1538] Linker: As used herein, a “linker” refers to a group of atoms, e.g., 10-1,000 atoms, and can be comprised of the atoms or groups such as, but not limited to, carbon, amino, alkylamino, oxygen, sulfur, sulfoxide, sulfonyl, carbonyl, and imine. The linker can be attached to a modified nucleoside or nucleotide on the nucleobase or sugar moiety at a first end, and to a payload, e.g., a detectable or therapeutic agent, at a second end. The linker can be of sufficient length as to not interfere with incorporation into a nucleic acid sequence. The linker can be used for any useful purpose, such as to form polynucleotide multimers (e.g., through linkage of two or more chimeric polynucleotides molecules or IVT polynucleotides) or polynucleotides conjugates, as well as to administer a payload, as described herein. Examples of chemical groups that can be incorporated into the linker include, but are not limited to, alkyl, alkenyl, alkynyl, amido, amino, ether, thioether, ester, alkylene, heteroalkylene, aryl, or heterocyclyl, each of which can be optionally substituted, as described herein. Examples of linkers include, but are not limited to, unsaturated alkanes, polyethylene glycols (e.g., ethylene or propylene glycol monomeric units, e.g., diethylene glycol, dipropylene glycol, triethylene glycol, tripropylene glycol, tetraethylene glycol, or tetraethylene glycol), and dextran polymers and derivatives thereof. Other examples include, but are not limited to, cleavable moieties within the linker, such as, for example, a disulfide bond (—S—S—) or an azo bond (—N═N—), which can be cleaved using a reducing agent or photolysis. Non-limiting examples of a selectively cleavable bond include an amido bond can be cleaved for example by the use of tris(2-carboxyethyl)phosphine (TCEP), or other reducing agents, and/or photolysis, as well as an ester bond can be cleaved for example by acidic or basic hydrolysis.

[1539] MCM Associated Disease: As used herein, an “MCM-associated disease” or “MCM-associated disorder” refers to diseases or disorders, respectively, which results from aberrant MCM activity (e.g., decreased activity or increased activity). As a non-limiting example, methylmalonic acidemia an MCM-associated disease.

[1540] Mitochondrial transit peptide: As used herein, the terms “mitochondrial transit peptide,” “mitochondrial targeting peptide,” and “mitochondrial targeting sequence” refer to an amino acid sequence (or a polynucleotide encoding such an amino acid sequence) that is a part of a larger polypeptide, where that sequence directs the transport or localization of the larger polypeptide to mitochondria.

[1541] Modified: As used herein “modified” refers to a changed state or structure of a molecule of the disclosure. Molecules can be modified in many ways including chemically, structurally, and functionally. In some embodiments, the mRNA molecules of the present disclosure are modified by the introduction of non-natural nucleosides and/or nucleotides, e.g., as it relates to the natural ribonucleotides A, U, G, and C. Noncanonical nucleotides such as the cap structures are not considered “modified” although they differ from the chemical structure of the A, C, G, U ribonucleotides.

[1542] Mucus: As used herein, “mucus” refers to the natural substance that is viscous and comprises mucin glycoproteins.

[1543] Naturally occurring: As used herein, “naturally occurring” means existing in nature without artificial aid.

[1544] Non-human vertebrate: As used herein, a “non-human vertebrate” includes all vertebrates except Homo sapiens, including wild and domesticated species. Examples of non-human vertebrates include, but are not limited to, mammals, such as alpaca, banteng, bison, camel, cat, cattle, deer, dog, donkey, gayal, goat, guinea pig, horse, llama, mule, pig, rabbit, reindeer, sheep water buffalo, and yak.

[1545] Nucleic acid sequence: The terms “nucleic acid sequence” and “nucleotide sequence” are used interchangeably and refer to a contiguous nucleic acid sequence. The sequence can be either single stranded or double stranded DNA or RNA, e.g., an mRNA.

[1546] The term “nucleic acid,” in its broadest sense, includes any compound and/or substance that comprises a polymer of nucleotides. These polymers are often referred to as polynucleotides. Exemplary nucleic acids or polynucleotides of the disclosure include, but are not limited to, ribonucleic acids (RNAs), deoxyribonucleic acids (DNAs), threose nucleic acids (TNAs), glycol nucleic acids (GNAs), peptide nucleic acids (PNAs), locked nucleic acids (LNAs, including LNA having a β-D-ribo configuration, α-LNA having an α-L-ribo configuration (a diastereomer of LNA), 2′-amino-LNA having a 2′-amino functionalization, and 2′-amino-α-LNA having a 2′-amino functionalization), ethylene nucleic acids (ENA), cyclohexenyl nucleic acids (CeNA) or hybrids or combinations thereof.

[1547] The phrase “nucleotide sequence encoding” and variants thereof refers to the nucleic acid (e.g., an mRNA or DNA molecule) coding sequence that comprises a nucleotide sequence that encodes a polypeptide or functional fragment thereof as set forth herein. The coding sequence can further include initiation and termination signals operably linked to regulatory elements including a promoter and polyadenylation signal capable of directing expression in the cells of an individual or mammal to which the nucleic acid is administered. The coding sequence can further include sequences that encode signal peptides or targeting peptides, e.g., mitochondrial transit peptides.

[1548] Off-target: As used herein, “off target” refers to any unintended effect on any one or more target, gene, or cellular transcript.

[1549] Open reading frame: As used herein, “open reading frame” or “ORF” refers to a sequence that does not contain a stop codon in a given reading frame.

[1550] Operably linked: As used herein, the phrase “operably linked” refers to a functional connection between two or more molecules, constructs, transcripts, entities, moieties or the like.

[1551] Optionally substituted: Herein a phrase of the form “optionally substituted X” (e.g., optionally substituted alkyl) is intended to be equivalent to “X, wherein X is optionally substituted” (e.g., “alkyl, wherein said alkyl is optionally substituted”). It is not intended to mean that the feature “X” (e.g., alkyl) per se is optional.

[1552] Part: As used herein, a “part” or “region” of a polynucleotide is defined as any portion of the polynucleotide that is less than the entire length of the polynucleotide.

[1553] Peptide: As used herein, “peptide” is less than or equal to 50 amino acids long, e.g., about 5, 10, 15, 20, 25, 30, 35, 40, 45, or 50 amino acids long.

[1554] Patient: As used herein, “patient” refers to a subject who can seek or be in need of treatment, requires treatment, is receiving treatment, will receive treatment, or a subject who is under care by a trained professional for a particular disease or condition.

[1555] Pharmaceutically acceptable: The phrase “pharmaceutically acceptable” is employed herein to refer to those compounds, materials, compositions, and/or dosage forms that are, within the scope of sound medical judgment, suitable for use in contact with the tissues of human beings and animals without excessive toxicity, irritation, allergic response, or other problem or complication, commensurate with a reasonable benefit/risk ratio.

[1556] Pharmaceutically acceptable excipients: The phrase “pharmaceutically acceptable excipient,” as used herein, refers any ingredient other than the compounds described herein (for example, a vehicle capable of suspending or dissolving the active compound) and having the properties of being substantially nontoxic and non-inflammatory in a patient. Excipients can include, for example: antiadherents, antioxidants, binders, coatings, compression aids, disintegrants, dyes (colors), emollients, emulsifiers, fillers (diluents), film formers or coatings, flavors, fragrances, glidants (flow enhancers), lubricants, preservatives, printing inks, sorbents, suspensing or dispersing agents, sweeteners, and waters of hydration. Exemplary excipients include, but are not limited to: butylated hydroxytoluene (BHT), calcium carbonate, calcium phosphate (dibasic), calcium stearate, croscarmellose, crosslinked polyvinyl pyrrolidone, citric acid, crospovidone, cysteine, ethylcellulose, gelatin, hydroxypropyl cellulose, hydroxypropyl methylcellulose, lactose, magnesium stearate, maltitol, mannitol, methionine, methylcellulose, methyl paraben, microcrystalline cellulose, polyethylene glycol, polyvinyl pyrrolidone, povidone, pregelatinized starch, propyl paraben, retinyl palmitate, shellac, silicon dioxide, sodium carboxymethyl cellulose, sodium citrate, sodium starch glycolate, sorbitol, starch (corn), stearic acid, sucrose, talc, titanium dioxide, vitamin A, vitamin E, vitamin C, and xylitol.

[1557] Pharmaceutically acceptable salts: The present disclosure also includes pharmaceutically acceptable salts of the compounds described herein. As used herein, “pharmaceutically acceptable salts” refers to derivatives of the disclosed compounds wherein the parent compound is modified by converting an existing acid or base moiety to its salt form (e.g., by reacting the free base group with a suitable organic acid). Examples of pharmaceutically acceptable salts include, but are not limited to, mineral or organic acid salts of basic residues such as amines; alkali or organic salts of acidic residues such as carboxylic acids; and the like. Representative acid addition salts include acetate, acetic acid, adipate, alginate, ascorbate, aspartate, benzenesulfonate, benzene sulfonic acid, benzoate, bisulfate, borate, butyrate, camphorate, camphorsulfonate, citrate, cyclopentanepropionate, digluconate, dodecylsulfate, ethanesulfonate, fumarate, glucoheptonate, glycerophosphate, hemisulfate, heptonate, hexanoate, hydrobromide, hydrochloride, hydroiodide, 2-hydroxy-ethanesulfonate, lactobionate, lactate, laurate, lauryl sulfate, malate, maleate, malonate, methanesulfonate, 2-naphthalenesulfonate, nicotinate, nitrate, oleate, oxalate, palmitate, pamoate, pectinate, persulfate, 3-phenylpropionate, phosphate, picrate, pivalate, propionate, stearate, succinate, sulfate, tartrate, thiocyanate, toluenesulfonate, undecanoate, valerate salts, and the like. Representative alkali or alkaline earth metal salts include sodium, lithium, potassium, calcium, magnesium, and the like, as well as nontoxic ammonium, quaternary ammonium, and amine cations, including, but not limited to ammonium, tetramethylammonium, tetraethylammonium, methylamine, dimethylamine, trimethylamine, triethylamine, ethylamine, and the like. The pharmaceutically acceptable salts of the present disclosure include the conventional non-toxic salts of the parent compound formed, for example, from non-toxic inorganic or organic acids. The pharmaceutically acceptable salts of the present disclosure can be synthesized from the parent compound that contains a basic or acidic moiety by conventional chemical methods. Generally, such salts can be prepared by reacting the free acid or base forms of these compounds with a stoichiometric amount of the appropriate base or acid in water or in an organic solvent, or in a mixture of the two; generally, nonaqueous media like ether, ethyl acetate, ethanol, isopropanol, or acetonitrile are used. Lists of suitable salts are found in Remington's Pharmaceutical Sciences, 17^{th} ed., Mack Publishing Company, Easton, Pa., 1985, p. 1418, Pharmaceutical Salts: Properties, Selection, and Use, P. H. Stahl and C. G. Wermuth (eds.), Wiley-VCH, 2008, and Berge et al., Journal of Pharmaceutical Science, 66, 1-19 (1977), each of which is incorporated herein by reference in its entirety.

[1558] Pharmaceutically acceptable solvate: The term “pharmaceutically acceptable solvate,” as used herein, means a compound of the disclosure wherein molecules of a suitable solvent are incorporated in the crystal lattice. A suitable solvent is physiologically tolerable at the dosage administered. For example, solvates can be prepared by crystallization, recrystallization, or precipitation from a solution that includes organic solvents, water, or a mixture thereof. Examples of suitable solvents are ethanol, water (for example, mono-, di-, and tri-hydrates), N-methylpyrrolidinone (NMP), dimethyl sulfoxide (DMSO), N,N′-dimethylformamide (DMF), N,N′-dimethylacetamide (DMAC), 1,3-dimethyl-2-imidazolidinone (DMEU), 1,3-dimethyl-3,4,5,6-tetrahydro-2-(1H)-pyrimidinone (DMPU), acetonitrile (ACN), propylene glycol, ethyl acetate, benzyl alcohol, 2-pyrrolidone, benzyl benzoate, and the like. When water is the solvent, the solvate is referred to as a “hydrate.”

[1559] Pharmacokinetic: As used herein, “pharmacokinetic” refers to any one or more properties of a molecule or compound as it relates to the determination of the fate of substances administered to a living organism. Pharmacokinetics is divided into several areas including the extent and rate of absorption, distribution, metabolism and excretion. This is commonly referred to as ADME where: (A) Absorption is the process of a substance entering the blood circulation; (D) Distribution is the dispersion or dissemination of substances throughout the fluids and tissues of the body; (M) Metabolism (or Biotransformation) is the irreversible transformation of parent compounds into daughter metabolites; and (E) Excretion (or Elimination) refers to the elimination of the substances from the body. In rare cases, some drugs irreversibly accumulate in body tissue.

[1560] Physicochemical: As used herein, “physicochemical” means of or relating to a physical and/or chemical property.

[1561] Polynucleotide: The term “polynucleotide” as used herein refers to polymers of nucleotides of any length, including ribonucleotides, deoxyribonucleotides, analogs thereof, or mixtures thereof. This term refers to the primary structure of the molecule. Thus, the term includes triple-, double- and single-stranded deoxyribonucleic acid (“DNA”), as well as triple-, double- and single-stranded ribonucleic acid (“RNA”). It also includes modified, for example by alkylation, and/or by capping, and unmodified forms of the polynucleotide. More particularly, the term “polynucleotide” includes polydeoxyribonucleotides (containing 2-deoxy-D-ribose), polyribonucleotides (containing D-ribose), including tRNA, rRNA, hRNA, siRNA and mRNA, whether spliced or unspliced, any other type of polynucleotide that is an N- or C-glycoside of a purine or pyrimidine base, and other polymers containing normucleotidic backbones, for example, polyamide (e.g., peptide nucleic acids “PNAs”) and polymorpholino polymers, and other synthetic sequence-specific nucleic acid polymers providing that the polymers contain nucleobases in a configuration that allows for base pairing and base stacking, such as is found in DNA and RNA. In particular aspects, the polynucleotide comprises an mRNA. In other aspect, the mRNA is a synthetic mRNA. In some aspects, the synthetic mRNA comprises at least one unnatural nucleobase. In some aspects, all nucleobases of a certain class have been replaced with unnatural nucleobases (e.g., all uridines in a polynucleotide disclosed herein can be replaced with an unnatural nucleobase, e.g., 5-methoxyuridine). In some aspects, the polynucleotide (e.g., a synthetic RNA or a synthetic DNA) comprises only natural nucleobases, i.e., A, C, T and U in the case of a synthetic DNA, or A, C, T, and U in the case of a synthetic RNA.

[1562] The skilled artisan will appreciate that the T bases in the codon maps disclosed herein are present in DNA, whereas the T bases would be replaced by U bases in corresponding RNAs. For example, a codon-nucleotide sequence disclosed herein in DNA form, e.g., a vector or an in-vitro translation (IVT) template, would have its T bases transcribed as U based in its corresponding transcribed mRNA. In this respect, both sequence-optimized DNA sequences (comprising T) and their corresponding RNA sequences (comprising U) are considered sequence-optimized nucleotide sequence of the present disclosure. A skilled artisan would also understand that equivalent codon-maps can be generated by replaced one or more bases with non-natural bases. Thus, e.g., a TTC codon (DNA map) would correspond to a UUC codon (RNA map), which in turn would correspond to a ΨΨC codon (RNA map in which U has been replaced with pseudouridine).

[1563] Standard A-T and G-C base pairs form under conditions that allow the formation of hydrogen bonds between the N3-H and C4-oxy of thymidine and the N1 and C6-NH2, respectively, of adenosine and between the C2-oxy, N3 and C4-NH2, of cytidine and the C2-NH2, N′—H and C6-oxy, respectively, of guanosine. Thus, for example, guanosine (2-amino-6-oxy-9-β-D-ribofuranosyl-purine) can be modified to form isoguanosine (2-oxy-6-amino-9-β-D-ribofuranosyl-purine). Such modification results in a nucleoside base that will no longer effectively form a standard base pair with cytosine. However, modification of cytosine (1-β-D-ribofuranosyl-2-oxy-4-amino-pyrimidine) to form isocytosine (1-β-D-ribofuranosyl-2-amino-4-oxy-pyrimidine-) results in a modified nucleotide that will not effectively base pair with guanosine but will form a base pair with isoguanosine (U.S. Pat. No. 5,681,702 to Collins et al., hereby incorporated by reference in its entirety). Isocytosine is available from Sigma Chemical Co. (St. Louis, Mo.); isocytidine can be prepared by the method described by Switzer et al. (1993) Biochemistry 32:10489-10496 and references cited therein; 2′-deoxy-5-methyl-isocytidine can be prepared by the method of Tor et al., 1993, J. Am. Chem. Soc. 115:4461-4467 and references cited therein; and isoguanine nucleotides can be prepared using the method described by Switzer et al., 1993, supra, and Mantsch et al., 1993, Biochem. 14:5593-5601, or by the method described in U.S. Pat. No. 5,780,610 to Collins et al., each of which is hereby incorporated by reference in its entirety. Other nonnatural base pairs can be synthesized by the method described in Piccirilli et al., 1990, Nature 343:33-37, hereby incorporated by reference in its entirety, for the synthesis of 2,6-diaminopyrimidine and its complement (1-methylpyrazolo-[4,3]pyrimidine-5,7-(4H,6H)-dione. Other such modified nucleotide units that form unique base pairs are known, such as those described in Leach et al. (1992) J. Am. Chem. Soc. 114:3675-3683 and Switzer et al., supra.

[1564] Polypeptide: As used herein, “polypeptide” means a polymer of amino acid residues (natural or unnatural) linked together most often by peptide bonds. The term, as used herein, refers to proteins, polypeptides, and peptides of any size, structure, or function. Thus, polypeptides include gene products, naturally occurring polypeptides, synthetic polypeptides, homologs, orthologs, paralogs, fragments and other equivalents, variants, and analogs of the foregoing. A polypeptide can be a single molecule or can be a multi-molecular complex such as a dimer, trimer or tetramer. They can also comprise single chain or multichain polypeptides and can be associated or linked. Most commonly disulfide linkages are found in multichain polypeptides. The term polypeptide can also apply to amino acid polymers in which one or more amino acid residues are an artificial chemical analogue of a corresponding naturally occurring amino acid.

[1565] The term polypeptide encompasses an amino acid polymer that has been modified naturally or by intervention; for example, disulfide bond formation, glycosylation, lipidation, acetylation, phosphorylation, or any other manipulation or modification, such as conjugation with a labeling component. Also included within the definition are, for example, polypeptides containing one or more analogs of an amino acid (including, for example, unnatural amino acids such as homocysteine, ornithine, p-acetylphenylalanine, D-amino acids, and creatine), as well as other modifications known in the art.

[1566] Polypeptide variant: As used herein, the term “polypeptide variant” refers to molecules that differ in their amino acid sequence from a native or reference sequence. The amino acid sequence variants can possess substitutions, deletions, and/or insertions at certain positions within the amino acid sequence, as compared to a native or reference sequence. Ordinarily, variants will possess at least about 50% identity (homology), at least about 60% identity, at least about 70% identity, at least about 80% identity, at least about 90% identity, at least about 95% identity, at least about 99% identity to a native or reference sequence. In some embodiments, they will be at least about 80%, or at least about 90% identical (homologous) to a native or reference sequence.

[1567] Polypeptide per unit drug (PUD): As used herein, a PUD or product per unit drug, is defined as a subdivided portion of total daily dose, usually 1 mg, pg, kg, etc., of a product (such as a polypeptide) as measured in body fluid or tissue, usually defined in concentration such as μmol/mL, mmol/mL, etc. divided by the measure in the body fluid.

[1568] Preventing: As used herein, the term “preventing” refers to partially or completely delaying onset of an infection, disease, disorder and/or condition; partially or completely delaying onset of one or more symptoms, features, or clinical manifestations of a particular infection, disease, disorder, and/or condition; partially or completely delaying onset of one or more symptoms, features, or manifestations of a particular infection, disease, disorder, and/or condition; partially or completely delaying progression from an infection, a particular disease, disorder and/or condition; and/or decreasing the risk of developing pathology associated with the infection, the disease, disorder, and/or condition.

[1569] Prodrug: The present disclosure also includes prodrugs of the compounds described herein. As used herein, “prodrugs” refer to any substance, molecule or entity that is in a form predicate for that substance, molecule or entity to act as a therapeutic upon chemical or physical alteration. Prodrugs can by covalently bonded or sequestered in some way and that release or are converted into the active drug moiety prior to, upon or after administered to a mammalian subject. Prodrugs can be prepared by modifying functional groups present in the compounds in such a way that the modifications are cleaved, either in routine manipulation or in vivo, to the parent compounds. Prodrugs include compounds wherein hydroxyl, amino, sulfhydryl, or carboxyl groups are bonded to any group that, when administered to a mammalian subject, cleaves to form a free hydroxyl, amino, sulfhydryl, or carboxyl group respectively. Preparation and use of prodrugs is discussed in T. Higuchi and V. Stella, “Pro-drugs as Novel Delivery Systems,” Vol. 14 of the A.C.S. Symposium Series, and in Bioreversible Carriers in Drug Design, ed. Edward B. Roche, American Pharmaceutical Association and Pergamon Press, 1987, both of which are hereby incorporated by reference in their entirety.

[1570] Proliferate: As used herein, the term “proliferate” means to grow, expand or increase or cause to grow, expand or increase rapidly. “Proliferative” means having the ability to proliferate. “Anti-proliferative” means having properties counter to or inapposite to proliferative properties.

[1571] Prophylactic: As used herein, “prophylactic” refers to a therapeutic or course of action used to prevent the spread of disease.

[1572] Prophylaxis: As used herein, a “prophylaxis” refers to a measure taken to maintain health and prevent the spread of disease. An “immune phrophylaxis” refers to a measure to produce active or passive immunity to prevent the spread of disease.

[1573] Protein cleavage site: As used herein, “protein cleavage site” refers to a site where controlled cleavage of the amino acid chain can be accomplished by chemical, enzymatic or photochemical means.

[1574] Protein cleavage signal: As used herein “protein cleavage signal” refers to at least one amino acid that flags or marks a polypeptide for cleavage.

[1575] Protein of interest: As used herein, the terms “proteins of interest” or “desired proteins” include those provided herein and fragments, mutants, variants, and alterations thereof.

[1576] Proximal: As used herein, the term “proximal” means situated nearer to the center or to a point or region of interest.

[1577] Pseudouridine: As used herein, pseudouridine refers to the C-glycoside isomer of the nucleoside uridine. A “pseudouridine analog” is any modification, variant, isoform or derivative of pseudouridine. For example, pseudouridine analogs include but are not limited to 1-carboxymethyl-pseudouridine, 1-propynyl-pseudouridine, 1-taurinomethyl-pseudouridine, 1-taurinomethyl-4-thio-pseudouridine, 1-methylpseudouridine (m¹ψ), 1-methyl-4-thio-pseudouridine (m¹s⁴ψ), 4-thio-1-methyl-pseudouridine, 3-methyl-pseudouridine (m³ψ), 2-thio-1-methyl-pseudouridine, 1-methyl-1-deaza-pseudouridine, 2-thio-1-methyl-1-deaza-pseudouridine, dihydropseudouridine, 2-thio-dihydropseudouridine, 2-methoxyuridine, 2-methoxy-4-thio-uridine, 4-methoxy-pseudouridine, 4-methoxy-2-thio-pseudouridine, N1-methyl-pseudouridine, 1-methyl-3-(3-amino-3-carboxypropyl)pseudouridine (acp³ ψ), and 2′-O-methyl-pseudouridine (ψm).

[1578] Purified As used herein, “purify,” “purified,” “purification” means to make substantially pure or clear from unwanted components, material defilement, admixture or imperfection.

[1579] Repeated transfection: As used herein, the term “repeated transfection” refers to transfection of the same cell culture with a polynucleotide a plurality of times. The cell culture can be transfected at least twice, at least 3 times, at least 4 times, at least 5 times, at least 6 times, at least 7 times, at least 8 times, at least 9 times, at least 10 times, at least 11 times, at least 12 times, at least 13 times, at least 14 times, at least 15 times, at least 16 times, at least 17 times at least 18 times, at least 19 times, at least 20 times, at least 25 times, at least 30 times, at least 35 times, at least 40 times, at least 45 times, at least 50 times or more.

[1580] Sample. As used herein, the term “sample” or “biological sample” refers to a subset of its tissues, cells or component parts (e.g., body fluids, including but not limited to blood, mucus, lymphatic fluid, synovial fluid, cerebrospinal fluid, saliva, amniotic fluid, amniotic cord blood, urine, vaginal fluid and semen). A sample further can include a homogenate, lysate or extract prepared from a whole organism or a subset of its tissues, cells or component parts, or a fraction or portion thereof, including but not limited to, for example, plasma, serum, spinal fluid, lymph fluid, the external sections of the skin, respiratory, intestinal, and genitourinary tracts, tears, saliva, milk, blood cells, tumors, organs. A sample further refers to a medium, such as a nutrient broth or gel, which can contain cellular components, such as proteins or nucleic acid molecule.

[1581] Signal Sequences: As used herein, the phrase “signal sequences” refers to a sequence that can direct the transport or localization of a protein.

[1582] Single unit dose: As used herein, a “single unit dose” is a dose of any therapeutic administered in one dose/at one time/single route/single point of contact, i.e., single administration event.

[1583] Similarity: As used herein, the term “similarity” refers to the overall relatedness between polymeric molecules, e.g., between polynucleotide molecules (e.g., DNA molecules and/or RNA molecules) and/or between polypeptide molecules. Calculation of percent similarity of polymeric molecules to one another can be performed in the same manner as a calculation of percent identity, except that calculation of percent similarity takes into account conservative substitutions as is understood in the art.

[1584] Split dose: As used herein, a “split dose” is the division of single unit dose or total daily dose into two or more doses.

[1585] Stable: As used herein “stable” refers to a compound that is sufficiently robust to survive isolation to a useful degree of purity from a reaction mixture, and in some cases capable of formulation into an efficacious therapeutic agent.

[1586] Stabilized: As used herein, the term “stabilize,” “stabilized,” “stabilized region” means to make or become stable.

[1587] Stereoisomer: As used herein, the term “stereoisomer” refers to all possible different isomeric as well as conformational forms that a compound can possess (e.g., a compound of any formula described herein), in particular all possible stereochemically and conformationally isomeric forms, all diastereomers, enantiomers and/or conformers of the basic molecular structure. Some compounds of the present disclosure can exist in different tautomeric forms, all of the latter being included within the scope of the present disclosure.

[1588] Subject: As used herein, the term “subject” or “patient” refers to any organism to which a composition in accordance with the disclosure can be administered, e.g., for experimental, diagnostic, prophylactic, and/or therapeutic purposes. Typical subjects include animals (e.g., mammals such as mice, rats, rabbits, non-human primates, and humans).

[1589] Substantially: As used herein, the term “substantially” refers to the qualitative condition of exhibiting total or near-total extent or degree of a characteristic or property of interest. One of ordinary skill in the biological arts will understand that biological and chemical phenomena rarely, if ever, go to completion and/or proceed to completeness or achieve or avoid an absolute result. The term “substantially” is therefore used herein to capture the potential lack of completeness inherent in many biological and chemical phenomena.

[1590] Substantially equal: As used herein as it relates to time differences between doses, the term means plus/minus 2%.

[1591] Substantially simultaneously: As used herein and as it relates to plurality of doses, the term means within 2 seconds.

[1592] Suffering from: An individual who is “suffering from” a disease, disorder, and/or condition has been diagnosed with or displays one or more symptoms of a disease, disorder, and/or condition.

[1593] Susceptible to: An individual who is “susceptible to” a disease, disorder, and/or condition has not been diagnosed with and/or can not exhibit symptoms of the disease, disorder, and/or condition but harbors a propensity to develop a disease or its symptoms. In some embodiments, an individual who is susceptible to a disease, disorder, and/or condition (for example, cancer) can be characterized by one or more of the following: (1) a genetic mutation associated with development of the disease, disorder, and/or condition; (2) a genetic polymorphism associated with development of the disease, disorder, and/or condition; (3) increased and/or decreased expression and/or activity of a protein and/or nucleic acid associated with the disease, disorder, and/or condition; (4) habits and/or lifestyles associated with development of the disease, disorder, and/or condition; (5) a family history of the disease, disorder, and/or condition; and (6) exposure to and/or infection with a microbe associated with development of the disease, disorder, and/or condition. In some embodiments, an individual who is susceptible to a disease, disorder, and/or condition will develop the disease, disorder, and/or condition. In some embodiments, an individual who is susceptible to a disease, disorder, and/or condition will not develop the disease, disorder, and/or condition.

[1594] Sustained release: As used herein, the term “sustained release” refers to a pharmaceutical composition or compound release profile that conforms to a release rate over a specific period of time.

[1595] Synthetic: The term “synthetic” means produced, prepared, and/or manufactured by the hand of man. Synthesis of polynucleotides or polypeptides or other molecules of the present disclosure can be chemical or enzymatic.

[1596] Targeted Cells: As used herein, “targeted cells” refers to any one or more cells of interest. The cells can be found in vitro, in vivo, in situ or in the tissue or organ of an organism. The organism can be an animal, for example a mammal, a human or a patient.

[1597] Targeting sequence: As used herein, the phrase “targeting sequence” refers to a sequence that can direct the transport or localization of a protein.

[1598] Therapeutic Agent: The term “therapeutic agent” refers to any agent that, when administered to a subject, has a therapeutic, diagnostic, and/or prophylactic effect and/or elicits a desired biological and/or pharmacological effect.

[1599] Therapeutically effective amount: As used herein, the term “therapeutically effective amount” means an amount of an agent to be delivered (e.g., nucleic acid, drug, therapeutic agent, diagnostic agent, prophylactic agent, etc.) that is sufficient, when administered to a subject suffering from or susceptible to an infection, disease, disorder, and/or condition, to treat, improve symptoms of, diagnose, prevent, and/or delay the onset of the infection, disease, disorder, and/or condition.

[1600] Therapeutically effective outcome: As used herein, the term “therapeutically effective outcome” means an outcome that is sufficient in a subject suffering from or susceptible to an infection, disease, disorder, and/or condition, to treat, improve symptoms of, diagnose, prevent, and/or delay the onset of the infection, disease, disorder, and/or condition.

[1601] Total daily dose: As used herein, a “total daily dose” is an amount given or prescribed in 24 hr. period. It can be administered as a single unit dose.

[1602] Transcription factor: As used herein, the term “transcription factor” refers to a DNA-binding protein that regulates transcription of DNA into RNA, for example, by activation or repression of transcription. Some transcription factors effect regulation of transcription alone, while others act in concert with other proteins. Some transcription factor can both activate and repress transcription under certain conditions. In general, transcription factors bind a specific target sequence or sequences highly similar to a specific consensus sequence in a regulatory region of a target gene. Transcription factors can regulate transcription of a target gene alone or in a complex with other molecules.

[1603] Transcription: As used herein, the term “transcription” refers to methods to introduce exogenous nucleic acids into a cell. Methods of transfection include, but are not limited to, chemical methods, physical treatments and cationic lipids or mixtures.

[1604] Treating: As used herein, the terms “treating” or “treatment” or “therapy” refers to partially or completely alleviating, ameliorating, improving, relieving, delaying onset of, inhibiting progression of, reducing severity of, and/or reducing incidence of one or more symptoms or features of a particular infection, disease, disorder, and/or condition. Treatment can be administered to a subject who does not exhibit signs of a disease, disorder, and/or condition and/or to a subject who exhibits only early signs of a disease, disorder, and/or condition for the purpose of decreasing the risk of developing pathology associated with the disease, disorder, and/or condition.

[1605] Unmodified: As used herein, “unmodified” refers to any substance, compound or molecule prior to being changed in any way. Unmodified may, but does not always, refer to the wild type or native form of a biomolecule. Molecules can undergo a series of modifications whereby each modified molecule can serve as the “unmodified” starting molecule for a subsequent modification.

[1606] Viral protein: As used herein, the phrase “viral protein” means any protein originating from a virus.

### X. Cross-Reference to Related Applications

[1607] This application claims priority to U.S. Provisional Patent Application No. 62/269,089 filed Dec. 17, 2015, entitled Polynucleotides Encoding Methylmalonyl-CoA Mutase; U.S. Provisional Patent Application No. 62/269,092 filed Dec. 17, 2015, entitled Methods of Using MCM-Encoding Polynucleotides; U.S. Provisional Patent Application No. 62/273,112 filed Dec. 30, 2015, entitled Polynucleotides Encoding Methylmalonyl-CoA Mutase; U.S. Provisional Patent Application No. 62/273,108 filed Dec. 30, 2015, entitled Methods of Using MCM-Encoding Polynucleotides; U.S. Provisional Patent Application No. 62/274,727 filed Jan. 4, 2016, entitled Polynucleotides Encoding Methylmalonyl-CoA Mutase; U.S. Provisional Patent Application No. 62/274,733 filed Jan. 4, 2016, entitled Methods of Using MCM-Encoding Polynucleotides; U.S. Provisional Patent Application No. 62/274,722 filed Jan. 4, 2016, entitled Polynucleotides Encoding Methylmalonyl-CoA Mutase; U.S. Provisional Patent Application No. 62/274,726 filed Jan. 4, 2016, entitled Methods of Using MCM-Enconding Polynucleotides; U.S. Provisional Patent Application No. 62/338,478 filed Can 18, 2016, entitled Polynucleotides Encoding Methylmalonyl-CoA Mutase; U.S. Provisional Patent Application No. 62/338,456 filed Can 18, 2016, entitled Polynucleotides Encoding Methylmalonyl-CoA Mutase; and U.S. Provisional Patent Application No. 62/409,343 filed Oct. 14, 2016, entitled Polynucleotides Encoding Methylmalonyl-CoA Mutase, the contents of each of which are herein incorporated by reference in its entirety.

### XI. Reference to Sequence Listing Submitted Electronically

[1608] The content of the electronically submitted sequence listing (Name: “3529_052PC07_SeqListing_ST25.txt”; Size: 1,080,572 bytes; and date of creation: Dec. 16, 2016) filed herewith the application is incorporated by reference in its entirety.

### XII. Equivalents and Scope

[1609] Those skilled in the art will recognize, or be able to ascertain using no more than routine experimentation, many equivalents to the specific embodiments in accordance with the disclosure described herein. The scope of the present disclosure is not intended to be limited to the above Description, but rather is as set forth in the appended claims.

[1610] In the claims, articles such as “a,” “an,” and “the” can mean one or more than one unless indicated to the contrary or otherwise evident from the context. Claims or descriptions that include “or” between one or more members of a group are considered satisfied if one, more than one, or all of the group members are present in, employed in, or otherwise relevant to a given product or process unless indicated to the contrary or otherwise evident from the context. The disclosure includes embodiments in which exactly one member of the group is present in, employed in, or otherwise relevant to a given product or process. The disclosure includes embodiments in which more than one, or all of the group members are present in, employed in, or otherwise relevant to a given product or process.

[1611] It is also noted that the term “comprising” is intended to be open and permits but does not require the inclusion of additional elements or steps. When the term “comprising” is used herein, the term “consisting of” is thus also encompassed and disclosed.

[1612] Where ranges are given, endpoints are included. Furthermore, it is to be understood that unless otherwise indicated or otherwise evident from the context and understanding of one of ordinary skill in the art, values that are expressed as ranges can assume any specific value or subrange within the stated ranges in different embodiments of the disclosure, to the tenth of the unit of the lower limit of the range, unless the context clearly dictates otherwise.

[1613] In addition, it is to be understood that any particular embodiment of the present disclosure that falls within the prior art can be explicitly excluded from any one or more of the claims. Since such embodiments are deemed to be known to one of ordinary skill in the art, they can be excluded even if the exclusion is not set forth explicitly herein. Any particular embodiment of the compositions of the disclosure (e.g., any nucleic acid or protein encoded thereby; any method of production; any method of use; etc.) can be excluded from any one or more claims, for any reason, whether or not related to the existence of prior art.

[1614] All cited sources, for example, references, publications, databases, database entries, and art cited herein, are incorporated into this application by reference, even if not expressly stated in the citation. In case of conflicting statements of a cited source and the instant application, the statement in the instant application shall control.

[1615] Section and table headings are not intended to be limiting.

### EXAMPLES

### Example 1. Chimeric Polynucleotide Synthesis

### Triphosphate Route

[1616] Two regions or parts of a chimeric polynucleotide can be joined or ligated using triphosphate chemistry. According to this method, a first region or part of 100 nucleotides or less can be chemically synthesized with a 5′ monophosphate and terminal 3′desOH or blocked OH. If the region is longer than 80 nucleotides, it can be synthesized as two strands for ligation.

[1617] If the first region or part is synthesized as a non-positionally modified region or part using in vitro transcription (IVT), conversion the 5′monophosphate with subsequent capping of the 3′ terminus can follow. Monophosphate protecting groups can be selected from any of those known in the art.

[1618] The second region or part of the chimeric polynucleotide can be synthesized using either chemical synthesis or IVT methods. IVT methods can include an RNA polymerase that can utilize a primer with a modified cap. Alternatively, a cap of up to 80 nucleotides can be chemically synthesized and coupled to the IVT region or part.

[1619] It is noted that for ligation methods, ligation with DNA T4 ligase, followed by treatment with DNAse should readily avoid concatenation.

[1620] The entire chimeric polynucleotide need not be manufactured with a phosphate-sugar backbone. If one of the regions or parts encodes a polypeptide, then such region or part can comprise a phosphate-sugar backbone.

[1621] Ligation can then be performed using any known click chemistry, orthoclick chemistry, solulink, or other bioconjugate chemistries known to those in the art.

### Synthetic Route

[1622] The chimeric polynucleotide can be made using a series of starting segments. Such segments include:
[1623] (a) Capped and protected 5′ segment comprising a normal 3′OH (SEG. 1)
[1624] (b) 5′ triphosphate segment which can include the coding region of a polypeptide and comprising a normal 3′OH (SEG. 2)
[1625] (c) 5′ monophosphate segment for the 3′ end of the chimeric polynucleotide (e.g., the tail) comprising cordycepin or no 3′OH (SEG. 3)

[1626] After synthesis (chemical or IVT), segment 3 (SEG. 3) can be treated with cordycepin and then with pyrophosphatase to create the 5′monophosphate.

[1627] Segment 2 (SEG. 2) can then be ligated to SEG. 3 using RNA ligase. The ligated polynucleotide can then be purified and treated with pyrophosphatase to cleave the diphosphate. The treated SEG. 2-SEG. 3 construct is then purified and SEG. 1 is ligated to the 5′ terminus. A further purification step of the chimeric polynucleotide can be performed.

[1628] Where the chimeric polynucleotide encodes a polypeptide, the ligated or joined segments can be represented as: 5′UTR (SEG. 1), open reading frame or ORF (SEG. 2) and 3′UTR+PolyA (SEG. 3).

[1629] The yields of each step can be as much as 90-95%.

### Example 2: PCR for cDNA Production

[1630] PCR procedures for the preparation of cDNA can be performed using 2×KAPA HIFI™ HotStart ReadyMix by Kapa Biosystems (Woburn, Mass.). This system includes 2×KAPA ReadyMix12.5 μl; Forward Primer (10 μM) 0.75 μl; Reverse Primer (10 μM) 0.75 μl; Template cDNA-100 ng; and dH₂O diluted to 25.0 l. The PCR reaction conditions can be: at 95° C. for 5 min. and 25 cycles of 98° C. for 20 sec, then 58° C. for 15 sec, then 72° C. for 45 sec, then 72° C. for 5 min. then 4° C. to termination.

[1631] The reverse primer of the instant disclosure can incorporate a poly-T₁₂₀ for a poly-A₁₂₀ in the mRNA. Other reverse primers with longer or shorter poly(T) tracts can be used to adjust the length of the poly(A) tail in the polynucleotide mRNA.

[1632] The reaction can be cleaned up using Invitrogen's PURELINK™ PCR Micro Kit (Carlsbad, Calif.) per manufacturer's instructions (up to 5 μg). Larger reactions will require a cleanup using a product with a larger capacity. Following the cleanup, the cDNA can be quantified using the NANODROP™ and analyzed by agarose gel electrophoresis to confirm the cDNA is the expected size. The cDNA can then be submitted for sequencing analysis before proceeding to the in vitro transcription reaction.

### Example 3. In Vitro Transcription (IVT)

[1633] The in vitro transcription reactions can generate polynucleotides containing uniformly modified polynucleotides. Such uniformly modified polynucleotides can comprise a region or part of the polynucleotides of the disclosure. The input nucleotide triphosphate (NTP) mix can be made using natural and un-natural NTPs.

[1634] A typical in vitro transcription reaction can include the following:
[1635] 1 Template cDNA—1.0 μg
[1636] 2 10× transcription buffer (400 mM Tris-HCl pH 8.0, 190 mM MgCl₂, 50 mM DTT, 10 mM Spermidine)—2.0 μl
[1637] 3 Custom NTPs (25 mM each)—7.2 μl
[1638] 4 RNase Inhibitor—20 U
[1639] T7 RNA polymerase—3000 U
[1640] 6 dH₂O—Up to 20.0 μl. and
[1641] 7 Incubation at 37° C. for 3 hr-5 hrs.

[1642] The crude IVT mix can be stored at 4° C. overnight for cleanup the next day. 1 U of RNase-free DNase can then be used to digest the original template. After 15 minutes of incubation at 37° C., the mRNA can be purified using Ambion's MEGACLEAR™ Kit (Austin, Tex.) following the manufacturer's instructions. This kit can purify up to 500 μg of RNA. Following the cleanup, the RNA can be quantified using the NanoDrop and analyzed by agarose gel electrophoresis to confirm the RNA is the proper size and that no degradation of the RNA has occurred.

### Example 4. Enzymatic Capping

[1643] Capping of a polynucleotide can be performed with a mixture includes: IVT RNA 60 μg-180 μg and dH₂O up to 72 μl. The mixture can be incubated at 65° C. for 5 minutes to denature RNA, and then can be transferred immediately to ice.

[1644] The protocol can then involve the mixing of 10× Capping Buffer (0.5 M Tris-HCl (pH 8.0), 60 mM KCl, 12.5 mM MgCl₂) (10.0 μl); 20 mM GTP (5.0 μl); 20 mM S-Adenosyl Methionine (2.5 μl); RNase Inhibitor (100 U); 2′-O-Methyltransferase (400U); Vaccinia capping enzyme (Guanylyl transferase) (40 U); dH₂O (Up to 28 μl); and incubation at 37° C. for 30 minutes for 60 μg RNA or up to 2 hours for 180 μg of RNA.

[1645] The polynucleotide can then be purified using Ambion's MEGACLEAR™ Kit (Austin, Tex.) following the manufacturer's instructions. Following the cleanup, the RNA can be quantified using the NANODROP™ (ThermoFisher, Waltham, Mass.) and analyzed by agarose gel electrophoresis to confirm the RNA is the proper size and that no degradation of the RNA has occurred. The RNA product can also be sequenced by running a reverse-transcription-PCR to generate the cDNA for sequencing.

### Example 5. PolyA Tailing Reaction

[1646] Without a poly-T in the cDNA, a poly-A tailing reaction must be performed before cleaning the final product. This can be done by mixing Capped IVT RNA (100 μl); RNase Inhibitor (20 U); 10× Tailing Buffer (0.5 M Tris-HCl (pH 8.0), 2.5 M NaCl, 100 mM MgCl₂)(12.0 μl); 20 mM ATP (6.0 μl); Poly-A Polymerase (20 U); dH₂O up to 123.5 μl and incubating at 37° C. for 30 min. If the poly-A tail is already in the transcript, then the tailing reaction can be skipped and proceed directly to cleanup with Ambion's MEGACLEAR™ kit (Austin, Tex.) (up to 500 μg). Poly-A Polymerase is, in some cases, a recombinant enzyme expressed in yeast.

[1647] It should be understood that the processivity or integrity of the polyA tailing reaction does not always result in an exact size polyA tail. Hence polyA tails of approximately between 40-200 nucleotides, e.g., about 40, 50, 60, 70, 80, 90, 91, 92, 93, 94, 95, 96, 97, 98, 99, 100, 101, 102, 103, 104, 105, 106, 107, 108, 109, 110, 150-165, 155, 156, 157, 158, 159, 160, 161, 162, 163, 164 or 165 are within the scope of the disclosure.

### Example 6. Natural 5′ Caps and 5′ Cap Analogues

[1648] 5′-capping of polynucleotides can be completed concomitantly during the in vitro-transcription reaction using the following chemical RNA cap analogs to generate the 5′-guanosine cap structure according to manufacturer protocols: 3′-O-Me-m7G(5′)ppp(5′) G [the ARCA cap]; G(5′)ppp(5′)A; G(5′)ppp(5′)G; m7G(5′)ppp(5′)A; m7G(5′)ppp(5′)G (New England BioLabs, Ipswich, Mass.). 5′-capping of modified RNA can be completed post-transcriptionally using a Vaccinia Virus Capping Enzyme to generate the “Cap 0” structure: m7G(5′)ppp(5′)G (New England BioLabs, Ipswich, Mass.). Cap 1 structure can be generated using both Vaccinia Virus Capping Enzyme and a 2′-O methyl-transferase to generate: m7G(5′)ppp(5′)G-2′-O-methyl. Cap 2 structure can be generated from the Cap 1 structure followed by the 2′-O-methylation of the 5′-antepenultimate nucleotide using a 2′-O methyl-transferase. Cap 3 structure can be generated from the Cap 2 structure followed by the 2′-O-methylation of the 5′-preantepenultimate nucleotide using a 2′-O methyl-transferase. Enzymes can be derived from a recombinant source.

[1649] When transfected into mammalian cells, the modified mRNAs can have a stability of between 12-18 hours or more than 18 hours, e.g., 24, 36, 48, 60, 72 or greater than 72 hours.

### Example 7. Capping Assays

### A. Protein Expression Assay

[1650] Polynucleotides encoding a polypeptide, containing any of the caps taught herein, can be transfected into cells at equal concentrations. After 6, 12, 24 and 36 hours post-transfection, the amount of protein secreted into the culture medium can be assayed by ELISA. Synthetic polynucleotides that secrete higher levels of protein into the medium would correspond to a synthetic polynucleotide with a higher translationally-competent Cap structure.

### B. Purity Analysis Synthesis

[1651] Polynucleotides encoding a polypeptide, containing any of the caps taught herein, can be compared for purity using denaturing Agarose-Urea gel electrophoresis or HPLC analysis. Polynucleotides with a single, consolidated band by electrophoresis correspond to the higher purity product compared to polynucleotides with multiple bands or streaking bands. Synthetic polynucleotides with a single HPLC peak would also correspond to a higher purity product. The capping reaction with a higher efficiency would provide a more pure polynucleotide population.

### C. Cytokine Analysis

[1652] Polynucleotides encoding a polypeptide, containing any of the caps taught herein, can be transfected into cells at multiple concentrations. After 6, 12, 24 and 36 hours post-transfection the amount of pro-inflammatory cytokines such as TNF-alpha and IFN-beta secreted into the culture medium can be assayed by ELISA. Polynucleotides resulting in the secretion of higher levels of pro-inflammatory cytokines into the medium would correspond to polynucleotides containing an immune-activating cap structure.

### D. Capping Reaction Efficiency

[1653] Polynucleotides encoding a polypeptide, containing any of the caps taught herein, can be analyzed for capping reaction efficiency by LC-MS after nuclease treatment. Nuclease treatment of capped polynucleotides would yield a mixture of free nucleotides and the capped 5′-5-triphosphate cap structure detectable by LC-MS. The amount of capped product on the LC-MS spectra can be expressed as a percent of total polynucleotide from the reaction and would correspond to capping reaction efficiency. The cap structure with higher capping reaction efficiency would have a higher amount of capped product by LC-MS.

### Example 8. Agarose Gel Electrophoresis of Modified RNA or RT PCR Products

[1654] Individual polynucleotides (200-400 ng in a 20 μl volume) or reverse transcribed PCR products (200-400 ng) can be loaded into a well on a non-denaturing 1.2% Agarose E-Gel (Invitrogen, Carlsbad, Calif.) and run for 12-15 minutes according to the manufacturer protocol.

### Example 9. Nanodrop Modified RNA Quantification and UV Spectral Data

[1655] Modified polynucleotides in TE buffer (1 μl) can be used for Nanodrop UV absorbance readings to quantitate the yield of each polynucleotide from an chemical synthesis or in vitro transcription reaction.

### Example 10. Formulation of Modified mRNA Using Lipidoids

[1656] Polynucleotides can be formulated for in vitro experiments by mixing the polynucleotides with the lipidoid at a set ratio prior to addition to cells. In vivo formulation can require the addition of extra ingredients to facilitate circulation throughout the body. To test the ability of these lipidoids to form particles suitable for in vivo work, a standard formulation process used for siRNA-lipidoid formulations can be used as a starting point. After formation of the particle, polynucleotide can be added and allowed to integrate with the complex. The encapsulation efficiency can be determined using a standard dye exclusion assays.

### Example 11. Method of Screening for Protein Expression

### A. Electrospray Ionization

[1657] A biological sample that can contain proteins encoded by a polynucleotide administered to the subject can be prepared and analyzed according to the manufacturer protocol for electrospray ionization (ESI) using 1, 2, 3 or 4 mass analyzers. A biologic sample can also be analyzed using a tandem ESI mass spectrometry system.

[1658] Patterns of protein fragments, or whole proteins, can be compared to known controls for a given protein and identity can be determined by comparison.

### B. Matrix-Assisted Laser Desorption/Ionization

[1659] A biological sample that can contain proteins encoded by one or more polynucleotides administered to the subject can be prepared and analyzed according to the manufacturer protocol for matrix-assisted laser desorption/ionization (MALDI).

[1660] Patterns of protein fragments, or whole proteins, can be compared to known controls for a given protein and identity can be determined by comparison.

### C. Liquid Chromatography-Mass Spectrometry-Mass Spectrometry

[1661] A biological sample, which can contain proteins encoded by one or more polynucleotides, can be treated with a trypsin enzyme to digest the proteins contained within. The resulting peptides can be analyzed by liquid chromatography-mass spectrometry-mass spectrometry (LC/MS/MS). The peptides can be fragmented in the mass spectrometer to yield diagnostic patterns that can be matched to protein sequence databases via computer algorithms. The digested sample can be diluted to achieve 1 ng or less starting material for a given protein. Biological samples containing a simple buffer background (e.g., water or volatile salts) are amenable to direct in-solution digest; more complex backgrounds (e.g., detergent, non-volatile salts, glycerol) require an additional clean-up step to facilitate the sample analysis.

[1662] Patterns of protein fragments, or whole proteins, can be compared to known controls for a given protein and identity can be determined by comparison.

### Example 12. Synthesis of mRNA Encoding MCM

[1663] The sequence optimized polynucleotides encoding MCM polypeptides, i.e., SEQ ID NOs: 1-207, 732-765, and 772, are synthesized as described in Examples 1 to 12.

[1664] Further, mRNA's encoding both mouse MCM and human MCM were prepared for Examples 13-19 described below, and they were synthesized as described in Examples 1 to 12.

[1665] An mRNA encoding human MCM (“hMCM-mRNA”) was constructed that encodes the naturally-occurring V671 mutation of MCM. The nucleotide sequence of hMCM-mRNA is provided in SEQ ID NO: 249. The hMCM-mRNA sequence includes both 5′ and 3′ UTR regions (SEQ ID NOs: 266 and 267, respectively):

5′UTR: TCAAGCTTTTGGACCCTCGTACAGAAGCTAATACGACTCACTA
TAGGGAAATAAGAGAGAAAAGAAGAGTAAGAAGAAATATAA
GAGCCACC
3′UTR: TGATAATAGGCTGGAGCCTCGGTGGCCATGCTTCTTGCCCCTT
GGGCCTCCCCCCAGCCCCTCCTCCCCTTCCTGCACCCGTACCCCC
GTGGTCTTTGAATAAAGTCTGAGTGGGCGGC

[1666] A mRNA encoding mouse MCM (“mMCM-mRNA”) was also constructed using standard molecular biology techniques. The nucleotide sequence of mMCM-mRNA is provided in SEQ ID NO: 250, and it encodes mouse MCM (SEQ ID NO: 268). The mMCM-mRNA sequence includes the same 5′ and 3′ UTR regions as hMCM-mRNA.

[1667] Both hMCM-mRNA and mMCM-mRNA were prepared as modified mRNA. Specifically, during in vitro translation, modified mRNA was generated using 1-methyl-pseudoUTP to ensure that the mRNAs contained 100% 1-methyl-pseudouridine instead of uridine. Further, both hMCM-mRNA and mMCM-mRNA were synthesized with a primer that introduced a 100 nucleotide polyA-tail, and a Cap 1 structure was generated on both mRNAs using Vaccinia Virus Capping Enzyme and a 2′-O methyl-transferase to generate: m7G(5′)ppp(5′)G-2′-O-methyl.

### Example 13. Detecting Endogenous MCM Expression In Vitro

[1668] MCM expression was characterized in a variety of cell lines, including cells derived from both mice and human sources. The cell lines tested included Hepa1-6 (mouse), HepG2 (human), SNU423 (human), and HeLa cells. Cell were cultured in standard conditions and cell extracts were obtained by placing the cells in lysis buffer. For comparison purposes, a mitochondrial extract from mouse liver was also prepared. To prepare the liver extract, whole liver was homogenized in an ice-cold sucrose-containing hypotonic buffer at neutral pH adjusted with 0.1 molarTrizma base-MOPS (3-(N-morpholino)propanesulfonic acid). The liver homogenates were centrifuged at 600 g in a cold table-top centrifuge to remove the nuclear fraction. The mitochondrial fraction was then collected by centrifugation of the cleared lysates at 7000 g.

[1669] To analyze MCM expression, 15 μg of each lysate was prepared in a 40 μL volume with lithium dodecyl sulfate sample loading buffer and subjected to standard Western blot analysis. For detection of MCM, the antibody used was anti-methylmalonyl-CoA mutase (mouse polyclonal; Ab67869; ABCAM®) at a 1:1000 dilution. For detection of a load control, the antibody used was anti-citrase synthase (rabbit polyclonal; PA5-22126; Thermo-Fisher SCIENTIFIC®). In FIG. 1, the signal provided by anti-MCM is provided in green, while the anti-citrate synthase signal is provided in red. FIG. 1 shows that MCM was found in all cell lines tested, including both mouse and human liver-derived cell lines. For all cell lines, the expression of MCM was in roughly the same proportion to the control citrate synthase signal, though less signal was observed in HeLa cells. FIG. 1 also shows that the cell lines expressed MCM at a level comparable to mouse liver mitochondrial mitochondrial extract.

[1670] To examine the localization of endogenous MCM, immunofluorescence analysis was performed on HeLa cells. MCM expression was detected using anti-methylmalonyl-CoA mutase (mouse monoclonal; Ab67869; ABCAM®), mitochondria were detected using Mitotracker, and the nucleus was stained with DAPI. Image analysis was performed on a Zeiss ELYRA imaging system. As seen in FIGS. 2(A)-(C), the HeLa immunofluorescent staining reveals extensive colocalization between mitochondria (red) and MCM immunofluorescence (green), with little to no colocalization between the nucleus (DAPI stain) and MCM. The finding that the majority of endogenous MCM localizes with mitochondria is consistent with MCM's known metabolic function and localization.

### Example 14. In Vitro Expression of MCM in HeLa Cells

[1671] To measure in vitro expression of human MCM in HeLa cells, those cells were seeded on 12-well plates (BD Biosciences, San Jose, USA) one day prior to transfection. mRNA formulations comprising human MCM (SEQ ID NO: 249) or a GFP control (encoding SEQ ID NO: 269) were transfected using 800 ng mRNA and 2 μL Lipofectamin 2000 in 60 μL OPTI-MEM per well and incubated. After 24 hours, the cells in each well were lysed using a consistent amount of lysis buffer. For comparison purposes, mouse liver mitochondrial extract was also prepared as described in Example 13. Protein concentrations of each were determined using a BCA assay according to manufacturer's instructions. To analyze MCM expression, equal load of each lysate (24 μg) was prepared in a loading buffer and subjected to standard Western blot analysis. For detection of MCM, the antibody used was anti-methylmalonyl-CoA mutase (rabbit monoclonal; ab133672; Abcam®) at a 1:1000 dilution.

[1672] The resulting Western blot, shown in FIG. 3, demonstrates that introduction of a mRNA formulation comprising hMCM sequence (SEQ ID NO: 249) greatly increased the level of MCM expression in HeLa cells relative to cells transfected with a control construct. The MCM expression level observed after introduction of mRNA encoding MCM were even higher than the levels present in liver mitochondrial mitochondrial extract. While FIG. 1 indicates that at least some endogenous MCM is present in HeLa cells, FIG. 3 shows that the MCM expression levels far exceed that baseline after introduction of mRNAs comprising hMCM.

### Example 15. In Vitro MCM Activity in HeLa Cells

[1673] While the Western blots of FIG. 3 demonstrate that MCM is expressed after introduction of mRNA comprising an MCM sequence, FIG. 3 does not address whether the exogenously-expressed MCM is active. To answer this question, an in vitro MCM activity assay was performed.

### A. Expression

[1674] HeLa cells were transfected with mRNA formulations comprising human MCM (SEQ ID NO: 249) or a GFP control (encoding SEQ ID NO: 269) were transfected with Lipofectamin 2000 and lysed as described in Example 14 above. For comparison purposes, mouse liver mitochondrial extract was also prepared as described in Example 13 above.

### B. Activity Assay

[1675] To assess whether exogenous MCM can function, an in vitro activity assay was performed using transfected HeLa cell lysates as the source of enzymatic activity. To begin, 60 μL of lysate containing 132 μg protein was mixed with 30 μL of MCM coenzyme adocobalimin (1 mM in distilled water) at 37° C. for 5 minutes. Equal amounts of DL-2-[methyl-¹⁴C]-methylmalonyl-CoA (50-60 mCi per mmol; Cat ARC0847; American Radiolabeled Chemicals) were then added to each reaction, which was further incubated at 37° C. for 10 minutes. The reaction was stopped by adding 50 μL of 100 g/L TCA and vortexing. The reaction tubes were then centrifuged at 13,000 g for 1 min, and the supernatant was analyzed for the presence of [¹⁴C]-succinyl-CoA using HPLC-based separation and quantification. Specifically, 20 μL of each activity reaction supernatant was analyzed using a HPLC system equipped with a Quaternary-Pump, a Multi-sampler, a Thermostated Column-Compartment, a Poroshell EC-C18 120 HPLC-column and a Radiometric Detector controlled by OpenLAB Chromatography Data System, all used according to the manufacturers' recommendations. Elusion was with a linear methanol gradient: 0-15 min (Solvent A: 95% 100 mM acetic acid in 100 mM sodium phosphate buffer, pH 7.0) and 15-25 min (95% Solvent A with 5% of an 18% v/v methanol/water solution) with a flow rate of 0.5 mL/min.

[1676] FIG. 4 shows that there was very low to no MCM activity detected in control transfected HeLa cells. FIG. 4 also shows, however, that transfection with mRNA encoding hMCM led to MCM activity of almost 0.2 mM/min/mg. The MCM activity of cell lysate generated by transfection with mRNA encoding hMCM was roughly half of that observed in mouse liver mitochondrial extract.

### Example 16. Measuring In Vitro Expression of MCM

[1677] Hepa1-6 cells and fibroblasts from normal subject (NHDF) and MMA patients (GM50 and GM1673) were examined for their capacity to express exogenous MCM.

[1678] Cells were transfected with mRNA formulations comprising human MCM (SEQ ID NO: 249), mouse MCM (SEQ ID NO: 250), or a GFP control (encoding SEQ ID NO: 269) via electroporation using a standard protocol. Each construct was tested separately. After 24 hours incubation, cells were lysed and protein concentration in each lysate was measured by BCA assay. To analyze MCM expression, equal load of each lysate (26 μg) was prepared in a loading buffer and subjected to standard Western blot analysis. For detection of MCM, the antibody used was anti-methylmalonyl-CoA mutase (mouse monoclonal; Anti-MUT TRUEMAB Antibody Clone OTI2C8; OriGene®) at a 1:5000 dilution. For detection of a load control, the antibody used was anti-citrase synthase (rabbit polyclonal; MA5-17625; Pierce®).

[1679] FIG. 5 shows that introduction of formulations containing a human MCM sequence (SEQ ID NO: 249) greatly increased the level of MCM expression in normal human cells and in cells from MMA patients, relative to cells transfected with a control construct. The increased MCM expression level observed after introduction of mRNA encoding hMCM were reflected in the appearance in FIG. 5 of an MCM band in cells transfected with mRNA encoding hMCM. While no significant difference in MCM levels was noted after transfection with mouse MCM (SEQ ID NO: 250), this could be due to a specific interaction of the MCM antibody with only the human form of the enzyme.

[1680] FIGS. 6A-6D show co-localization of MCM and mitochondria in human fibroblasts transfected with eGFP or MCM mRNAs. To examine the localization of mRNA-encoded hMCM in mitochondria, 1×10⁶ MCM-deficient patient fibroblasts (GM01673) were transfected with 1 μg of hMCM mRNA. 24 hours after transfection, the cells were incubated with 200 nM MitoTracker Red CMXR_{OS} (M7512, ThermoFisher Scientific) for 30 min to mark mitochondria and stained with anti-MCM mouse mAb (TA506873, Origene) to examine the cellular localization.). FIGS. 6A and 6C are images taken of patient fibroblasts transfected with mRNA encoding eGFP. FIGS. 6B and 6D are images taken of patient fibroblasts transfected with mRNA encoding hMCM. A co-localization of MCM and mitochondria was observed, suggesting expressed MCM proteins reside inside mitochondria.

### Example 17. Measuring In Vitro MCM Activity

### A. Expression

[1681] Hepa1-6 cells and fibroblasts from normal human subject (NHDF) and MMA patients (GM50 and GM1673) were cultured. Cells were transfected with mRNA formulations comprising human MCM (SEQ ID NO: 249), mouse MCM (SEQ ID NO: 250), or a GFP control (encoding SEQ ID NO: 269) via electroporation using a standard protocol.

### B. Activity Assay

[1682] To assess whether exogenous MCM can function, an in vitro activity assay was performed using transfected cell lysates as the source of enzymatic activity. To begin, 60 μL of lysate containing 100 μg protein was mixed with 30 μL of MCM coenzyme adocobalimin (1 mM in distilled water) at 37° C. for 5 minutes. Equal amounts of DL-2-[methyl-¹⁴C]-methylmalonyl-CoA (50-60 mCi per mmol; Cat ARC0847; American Radiolabeled Chemicals) were then added to each reaction, which was further incubated at 37° C. for 10 minutes. The reaction was stopped by adding 50 μL of 100 g/L TCA and vortexing. The reaction tubes were then centrifuged at 13,000 g for 1 min, and the supernatant was analyzed for the presence of [¹⁴C]-succinyl-CoA using HPLC-based separation and quantification. Specifically, 20 μL of each activity reaction supernatant was analyzed using a HPLC system equipped with a Quaternary-Pump, a Multi-sampler, a Thermostated Column-Compartment, a Poroshell EC-C18 120 HPLC-column and a Radiometric Detector controlled by OpenLAB Chromatography Data System, all used according to the manufacturers' recommendations. Elusion was with a linear methanol gradient: 0-15 min (Solvent A: 95% 100 mM acetic acid in 100 mM sodium phosphate buffer, pH 7.0) and 15-25 min (95% Solvent A with 5% of an 18% v/v methanol/water solution) with a flow rate of 0.5 mL/min.

[1683] FIG. 7 shows that, for each cell lines tested, transfection with mRNA's encoding either mouse MCM or human MCM increased the level of MCM activity in all cell types tested. Thus this data demonstrates that transfection of mRNA encoding MCM leads to the expression of active MM enzyme in Hepa1-6 cells, fibroblasts from normal human subjects, and fibroblasts from MMA patients. Further, human MCM increased MCM activity to a greater degree than did mouse MCM when transfected into Hepa1-6 cells.

### Example 18. Increased In Vivo MCM Expression

[1684] To assess the ability of MCM-containing mRNA's to facilitate MCM expression in vivo, mRNA encoding human MCM (SEQ ID NO: 249) was introduced into C57B/L6 mice. C57B/L6 mice were injected intravenously with either control mRNA (NT-FIX) or hMCM mRNA at 0.5 mg/kg. The mRNA was formulated in lipid nanoparticles for delivery into the mice. Mice were sacrificed after 24 or 48 hrs. and MCM protein levels in liver lysates were determined by capillary electrophoresis (CE). Citrate synthase expression was examined for use as a loading control. For control NT-FIX injections, 4 mice were tested for each time point. For hMCM mRNA injections, 6 mice were tested for each time point.

[1685] As shown in FIGS. 8A and 8B, MCM expression was drastically increased in all mice injected with mRNA encoding human MCM. The MCM expression peaked at the 24 hour time point, and was still higher than control mice at 48 hours. Relatively low levels of variance were observed between mice of each experimental condition, indicating that treatment with mRNA encoding MCM is capable of reliably inducing expression of MCM.

### Example 19. Human MCM Mutant Constructs

[1686] According to the present disclosure, the polynucleotide can comprise at least a first region of linked nucleosides encoding human MCM. Exemplary human MCM protein sequences of the present disclosure are listed in Table 3 above.

### Example 20. MMA Levels and Body Weight Change in MCK Mouse Model

[1687] A MCK mouse model of MMA (Mut−/−;Tg^{INS-MCK-Mut}) is known in the literature and lacks exon 3 of the MCM allele, which encodes the substate-binding pocket of MCM. Manoli 2013 (PNAS 110(33):13552-13557 (2013); and Harrington et al., “Stable Isotope Breath Tests to Assess Metabolite Flux in Methylmalonic Acidemia (MMA)”, American Society of Human Genetics, Abstract, 2014, which are incorporated herein by reference in their entireties. The MCM knockout mice exhibit a semipenetrant neonatal lethal phenotype, with most mice perishing in the early neonatal period. This mouse model is described in WO 2014/143884 A2, hereby incorporated by reference in its entirety. Because the severe phenotype associated with the knockout makes study difficult, researchers have prepared partial rescues of the MCM knockout mice by transgenic rescue with tissue-specific expression or expression of mutants that mimic those mutations associated with human MMA. For example, transgenic mice that express MCM in the knockout background under the control of the muscle-specific creatine kinase promoter (“the MCK mice”) survive but still display severe metabolic perturbations and growth abnormalities.

[1688] The effectiveness of mRNA encoding human MCM was assessed in the MCK mouse model of MMA (Mut−/−;Tg^{INS-MCK-Mut}), N=3-4. MCK mice were injected intravenously with either control mRNA (NT-FIX) or codon optimized human MCM mRNA at 0.16 mg/kg. Five (5) injections were done with MCM mRNA (SEQ ID NO: 734, FIG. 9) at 0.16 mg/kg; and two injections were done with MCM mRNA (SEQ ID NO: 735, FIG. 10) at 0.2 mg/kg. The mRNA was formulated in lipid nanoparticles (Compound 18) for delivery into the mice via tail vein injection. Plasma was collected twice a week, 3 and 6 days after dosing. Plasma MMA was determined by LC-MS/MS. Body weight was measured twice a week at time of dosing. Mice were not sacrificed at the end of this study and were used for other studies. On the third scheduled injection (day 15), one of the mice that had previously been administered control mRNA was switched to being administered hMCM mRNA and the other mouse administered control mRNA was found dead. This testing demonstrated that repeat intravenous dosing of hMCM mRNA corrected biochemical and growth abnormalities in an animal model of Methylmalonic acidemia (MMA-emia).

[1689] Although expression of MCM in skeletal muscle rescues MCK mice from neonatal lethality, these mice display severe metabolic perturbations and growth retardation that resembles clinical characteristics observed in methylmalonic acidemia patients. In the present example, repeat IV dosing of Compound 18 LNP-encapsulated hMCM mRNA (fully modified with mo5U) was investigated to determine whether mRNA therapy can correct biochemical and growth abnormalities. MCK mice were administered weekly IV injections of 0.16 mg/kg hMCM mRNA (encoding SEQ ID NO: 734) or a vehicle control (non-translating factor IX, NTFIX) mRNA. MCK mice that received hMCM mRNA injections showed decreased plasma MMA levels 3 and 6 days following each dose throughout the entire treatment period (FIG. 16A). Importantly, treated MCK mice also showed increased weight gain which was correlated to decreased plasma MMA levels (FIG. 16B). In contrast, MCK mice that received vehicle mRNA control (NTFIX) showed neither reduction in plasma MMA levels nor increase in body weight following 2 doses (FIG. 16A). Indeed, after 2 IV doses of NTFIX injections, one of the MCK mice died likely due to metabolic decompensation although the cause of death is unknown. To present further loss of MCK mouse, the vehicle control (NTFIX) mRNA treated mouse was switched to hMCM mRNA therapy. Interestingly, once that MCK mouse started to receive hMCM mRNA treatment, plasma MMA levels of this mouse quickly decreased from 835 μM to 153 μM within 3 days (FIG. 16A). Moreover, this mouse gained 4.8 g in body weight in just one week following crossover to hMCM mRNA therapy. After the fifth IV dose, the MCK mice were given a 10 day washout period (FIG. 16B). Interestingly, there was a partial rebound of plasma MMA to 955+/−SD μM in these mice 10 days following their last hMCM mRNA injection (FIG. 16A). Moreover, during this washout period, decreased body weight was observed in these mice (0.13+/−SD to 2.8+/−SD g) from day 6 to day 10 (FIG. 16B). When MCK mice were re-dosed with 0.2 mg/kg IV hMCM mRNA (encoding SEQ ID NO: 734) after the 10 day washout, plasma MMA levels decreased to 226+/−μM and body weight increased from 1.38+/−g to 3.81+/−g in 4 days. These data demonstrates that LNP-formulated hMCM mRNA is efficacious in lowering plasma MMA levels and simultaneously increasing body weight in this methylmalonic acidemia mouse model of the more severe Mut0 subtype.

### Example 21. Expression of MCM in Liver of Wild-type Mice Dosed with Codon Optimized MCM Human mRNA Compared to Endogenous MCM in Normal Mouse and Human Liver

[1690] To assess MCM expression in vivo, codon optimized MCM human mRNA (SEQ ID NO: 734) was introduced into wild-type CD1 mice. CD1 mice were injected intravenously with a single dose of codon optimized MCM mRNA (SEQ ID NO: 734) at 0.2 mg/kg. The mRNA was formulated in lipid nanoparticles (Compound 18) for delivery into the mice via tail vein injection (N=3). Mice were sacrificed 24 hours after dosing, and MCM protein levels in liver lysates were determined by LC-MS/MS. As shown in FIG. 17, dosing at 0.2 mg/kg in wild-type mice resulted in abundant expression of human MCM, higher than endogenous MCM found in human and normal mouse livers.

### Example 22. MCM Expression in Liver of Mice Administered Codon Optimized MCM mRNA

[1691] LNP encapsulates hMUT mRNA and distributes the mRNA to the liver, where it is subsequently translated to its functional protein. The half-life of the mRNA and protein product are critical determinants of the pharmacokinetics of mRNA-based therapeutics. To understand the kinetics of hMUT mRNA, the LNP, and the encoded MUT protein, we performed a PK study in wild type CD1 mice in which mice were administered a single IV bolus of 0.5 mg/kg hMUT mRNA or vehicle control (NTFIX) mRNA. Our data showed that 2 hours after administration, 939 ng/g LNP was detected in livers and by 6 hours, LNP concentrations decreased by almost 98.5% (FIG. 18A). At 16 hours, LNP concentrations are not detectable in the liver suggesting that the LNP is highly degradable and is rapidly cleared in liver. hMUT mRNA was also cleared quickly as shown in FIG. 18B, with a precipitous drop of hMut mRNA levels at 6 hours following a single IV hMUT mRNA administration (FIG. 18B). Over 98% Mut mRNA was cleared 48 hours after administration. In contrast, human MUT protein is rapidly expressed and showed a significantly longer half-life (FIG. 18C). Human MUT protein is detectable 2 hours and peaks at 16 hours after hMUT IV mRNA administration (FIG. 18C). Our data suggested that the half-life if expressed human Mut is approximately 1.6 days. The data show a decline in mRNA levels in the liver with levels reaching baseline by about 2 days. The sustained expression of MCM protein out to 5 days following a single administration of MCM-encoding mRNA demonstrates potential advantages in treating MMA patients with weekly dosing being a potentially acceptable dosing regimen to achieve therapeutically effective doses in humans.

### Example 23. Lipid Nanoparticle Quantification and Kidney, Liver and Spleen Analysis

[1692] In vivo analysis of lipid nanoparticles quantification, in situ hybridization for kidney, and bDNA for spleen is assessed. Codon optimized MCM mRNA (SEQ ID NO: 735) is administered to CD1 mice. CD1 mice are injected intravenously with either control mRNA (NT-FIX) or codon optimized MCM mRNA at 0.5 mg/kg. The mRNA was formulated in lipid nanoparticles (Compound 18) for delivery into the mice via tail vein injection. Mice (N=3/time point) are sacrificed after 2, 6, 16, 24, 48, 72, 120, or 168 hours. Lipid nanoparticles are quantified at early time points (2, 6, and 16 hours). ISH of kidney and bDNA of liver and spleen are analyzed and compared to untreated CD1 mice.

### Example 24. In Vivo Delivery of mRNA Encoding MCM

[1693] To assess methods of delivering MCM in vivo, codon optimized MCM human mRNA, i.e., mRNA1, mRNA2, mRNA3, mRNA4, and mRNA5 (SEQ ID NOs: 775, 776, 777, 734 and 778, respectively) or a vehicle control (non-translating factor IX, NTFIX) mRNA was introduced into wild-type CD1 mice. The mice were injected intravenously with a single dose of mRNA at 0.2 mg/kg. The mRNA was formulated for delivery into the mice via tail vein injection (N=3 per formulation). Compositions were formulated with either MC3 or Compound 18. Mice were sacrificed 24 hours after dosing, and MCM protein levels in liver lysates were determined by Western blot. FIG. 19A is a Western blot with equal loading of each lysate. FIG. 19B is a quantification of the expression patterns in the Western blot of FIG. 19A. As shown in FIGS. 19A and 19B, both MC3 formulations and Compound 18 formulations were effective in facilitating delivery and expression of mRNA encoding MCM. Delivering mRNAs encoding MCM in wild-type mice resulted in expression of human MCM at levels much higher than that of endogenous MCM in control mice.

### Example 24. In Vivo MMA Level and Body Weight Effect on MCK Mice

[1694] Two MCK mice were administered weekly IV injections of 0.2 mg/kg hMCM mRNA and the other two received a vehicle control (non-translating factor IX, NTFIX) mRNA at 0.2 mg/kg. The study encompasses 2 doses. The MCK mice that received hMCM mRNA injections showed decreased plasma MMA levels 3 days following each dose (FIG. 20A). Importantly, treated MCK mice also showed significantly increased body weight which was correlated to decreased plasma MMA levels. See FIG. 20B. In contrast, the MCK mouse that received vehicle mRNA control (NTFIX) showed no significant reduction in plasma MMA levels nor increase in body weight following 2 doses. One MCK mouse received the vehicle control died.

[1695] Certain exemplary mRNA sequences are shown below:

hMCM mRNA
(SEQ ID NO: 769)
TCAAGCTTTTGGACCCTCGTACAGAAGCTAATACGACTCACTATAGGGAAATAAGAGAGAAAAGAAGAGTAAGA
AGAAATATAAGAGCCACCATGCTGCGGGCCAAGAACCAGCTGTTCCTGCTGAGCCCTCACTACCTGCGGCAGGT
GAAGGAGAGCAGCGGCAGCCGGCTGATCCAGCAGCGGCTGCTGCACCAGCAGCAGCCCCTGCACCCCGAGTGGG
CCGCCCTGGCCAAGAAGCAGCTGAAGGGCAAGAACCCCGAGGACCTGATCTGGCACACGCCCGAGGGCATCAGC
ATCAAGCCCCTGTACAGCAAGCGGGACACCATGGACCTGCCCGAGGAGCTGCCCGGCGTGAAGCCCTTCACCCG
GGGCCCCTACCCCACCATGTACACCTTCCGGCCCTGGACCATCCGGCAGTACGCCGGCTTCAGCACCGTGGAGG
AGAGCAACAAGTTCTACAAGGACAACATCAAGGCCGGCCAGCAGGGCCTGAGCGTGGCCTTCGACCTGGCCACC
CACCGGGGCTACGACAGCGACAACCCACGGGTGCGGGGCGACGTGGGCATGGCCGGCGTGGCCATCGACACCGT
GGAGGACACCAAGATCCTGTTCGACGGCATCCCTCTGGAGAAGATGAGCGTGAGCATGACCATGAACGGCGCCG
TGATCCCCGTGCTGGCCAACTTCATCGTGACCGGCGAGGAGCAGGGCGTGCCCAAGGAGAAGCTGACCGGCACC
ATCCAGAACGACATCCTGAAGGAGTTCATGGTGCGGAACACCTACATCTTCCCTCCCGAGCCCAGCATGAAGAT
CATCGCCGACATCTTCGAGTACACCGCCAAGCACATGCCCAAGTTCAACAGCATCAGCATCAGCGGCTACCACA
TGCAGGAGGCCGGCGCCGACGCCATCCTGGAGCTGGCCTACACCCTGGCCGACGGCCTGGAGTACAGCCGGACC
GGCCTGCAGGCCGGCCTGACCATCGACGAGTTCGCGCCCCGGCTGAGCTTCTTCTGGGGCATCGGCATGAACTT
CTACATGGAGATCGCCAAGATGCGGGCCGGCCGGCGGCTGTGGGCCCACCTGATCGAGAAGATGTTCCAGCCCA
AGAACAGCAAGAGCCTGCTGCTGCGGGCCCACTGCCAGACCAGCGGCTGGAGCCTGACCGAGCAGGACCCCTAC
AACAACATCGTGCGGACCGCCATCGAGGCCATGGCCGCCGTGTTCGGCGGCACCCAGAGCCTGCACACCAACAG
CTTCGACGAGGCCCTGGGCCTGCCCACCGTGAAGAGCGCCCGGATCGCCCGGAACACCCAGATCATCATCCAGG
AGGAGAGCGGCATCCCCAAGGTGGCCGACCCCTGGGGCGGCAGCTACATGATGGAGTGCCTGACCAACGACGTG
TACGACGCCGCCCTGAAGCTGATCAACGAGATCGAGGAGATGGGCGGCATGGCCAAGGCCGTGGCCGAGGGCAT
CCCCAAGCTGCGGATCGAGGAGTGCGCCGCCCGGCGGCAGGCCCGGATCGACAGCGGCAGCGAGGTGATCGTGG
GCGTGAACAAGTACCAGCTGGAGAAGGAGGACGCCGTGGAGGTGCTGGCCATCGACAACACCAGCGTGCGGAAC
CGGCAGATCGAGAAGCTGAAGAAGATCAAGAGCAGCCGGGACCAGGCCCTGGCCGAGCGGTGCCTGGCCGCCCT
GACCGAGTGCGCCGCCAGCGGCGACGGCAACATCCTGGCCCTGGCCGTGGACGCCAGCCGGGCCCGGTGCACCG
TGGGCGAGATCACCGACGCCCTGAAGAAGGTGTTCGGCGAGCACAAGGCCAACGACCGGATGGTGAGCGGCGCC
TACCGGCAGGAGTTCGGCGAGAGCAAGGAGATCACCAGCGCCATCAAGCGGGTGCACAAGTTCATGGAGCGGGA
GGGCCGGCGGCCCCGGCTGCTGGTGGCCAAGATGGGCCAGGACGGCCACGACCGGGGCGCCAAGGTGATCGCCA
CCGGCTTCGCCGACCTGGGCTTCGACGTGGACATCGGCCCACTGTTCCAGACGCCCCGGGAGGTGGCCCAGCAG
GCCGTGGACGCCGACGTGCACGCCGTGGGCGTGAGCACCCTGGCCGCCGGCCACAAGACCCTGGTGCCCGAGCT
GATCAAGGAGCTGAACAGCCTGGGCCGGCCCGACATCCTGGTGATGTGCGGCGGCGTGATCCCGCCCCAGGACT
ACGAGTTCCTGTTCGAGGTGGGCGTGAGCAACGTGTTCGGCCCCGGCACCCGGATCCCCAAGGCCGCCGTGCAG
GTGCTGGACGACATCGAGAAGTGCCTGGAGAAGAAGCAGCAGAGCGTGTGATAATAGTCCATAAAGTAGGAAAC
ACTACAGCTGGAGCCTCGGTGGCCATGCTTCTTGCCCCTTGGGCCTCCCCCCAGCCCCTCCTCCCCTTCCTGCA
CCCGTACCCCCCGCATTATTACTCACGGTACGAGTGGTCTTTGAATAAAGTCTGAGTGGGCGGC
hMCM mRNA
(SEQ ID NO: 770)
TCAAGCTTTTGGACCCTCGTACAGAAGCTAATACGACTCACTATAGGGAAATAAGAGAGAAAAGAAGAGTAAGA
AGAAATATAAGAGCCACCATGCTGCGGGCCAAGAACCAGCTGTTCCTGCTGAGCCCCCACTACCTGCGGCAGGT
GAAGGAGAGCAGCGGCAGCCGGCTGATCCAGCAGCGCCTCCTCCACCAGCAGCAGCCCCTCCACCCCGAGTGGG
CCGCCCTCGCCAAGAAGCAGCTCAAGGGCAAGAACCCCGAGGACCTCATCTGGCACACCCCCGAGGGCATCTCC
ATCAAGCCCCTCTACTCCAAGCGCGACACCATGGACCTCCCCGAGGAGCTCCCCGGCGTCAAGCCCTTCACCCG
CGGCCCCTACCCCACCATGTACACCTTCCGCCCCTGGACCATCCGCCAGTACGCCGGCTTCTCCACCGTCGAGG
AGTCCAACAAGTTCTACAAGGACAACATCAAGGCCGGCCAGCAGGGCCTCTCCGTCGCCTTCGACCTCGCCACC
CACCGCGGCTACGACTCCGACAACCCCCGCGTCCGCGGCGACGTCGGCATGGCCGGCGTCGCCATCGACACCGT
CGAGGACACCAAGATCCTCTTCGACGGCATCCCCCTCGAGAAGATGTCCGTCTCCATGACCATGAACGGCGCCG
TCATCCCCGTCCTCGCCAACTTCATCGTCACCGGCGAGGAGCAGGGCGTCCCCAAGGAGAAGCTCACCGGCACC
ATCCAGAACGACATCCTCAAGGAGTTCATGGTCCGCAACACCTACATCTTCCCCCCCGAGCCCTCCATGAAGAT
CATCGCCGACATCTTCGAGTACACCGCCAAGCACATGCCCAAGTTCAACTCCATCTCCATCTCCGGCTACCACA
TGCAGGAGGCCGGCGCCGACGCCATCCTCGAGCTCGCCTACACCCTCGCCGACGGCCTCGAGTACTCCCGCACC
GGCCTCCAGGCCGGCCTCACCATCGACGAGTTCGCCCCCCGCCTCTCCTTCTTCTGGGGCATCGGCATGAACTT
CTACATGGAGATCGCCAAGATGCGCGCCGGCCGCCGCCTCTGGGCCCACCTCATCGAGAAGATGTTCCAGCCCA
AGAACTCCAAGTCCCTCCTCCTCCGCGCCCACTGCCAGACCTCCGGCTGGTCCCTCACCGAGCAGGACCCCTAC
AACAACATCGTCCGCACCGCCATCGAGGCCATGGCCGCCGTCTTCGGCGGCACCCAGTCCCTCCACACCAACTC
CTTCGACGAGGCCCTCGGCCTCCCCACCGTCAAGTCCGCCCGCATCGCCCGCAACACCCAGATCATCATCCAGG
AGGAGTCCGGCATCCCCAAGGTCGCCGACCCCTGGGGCGGCTCCTACATGATGGAGTGCCTCACCAACGACGTC
TACGACGCCGCCCTCAAGCTCATCAACGAGATCGAGGAGATGGGCGGCATGGCCAAGGCCGTCGCCGAGGGCAT
CCCCAAGCTCCGCATCGAGGAGTGCGCCGCCCGCCGCCAGGCCCGCATCGACTCCGGCTCCGAGGTCATCGTCG
GCGTCAACAAGTACCAGCTCGAGAAGGAGGACGCCGTCGAGGTCCTCGCCATCGACAACACCTCCGTCCGCAAC
CGCCAGATCGAGAAGCTCAAGAAGATCAAGTCCTCCCGCGACCAGGCCCTCGCCGAGCGCTGCCTCGCCGCCCT
CACCGAGTGCGCCGCCTCCGGCGACGGCAACATCCTCGCCCTCGCCGTCGACGCCTCCCGCGCCCGCTGCACCG
TCGGCGAGATCACCGACGCCCTCAAGAAGGTCTTCGGCGAGCACAAGGCCAACGACCGCATGGTCTCCGGCGCC
TACCGCCAGGAGTTCGGCGAGTCCAAGGAGATCACCTCCGCCATCAAGCGCGTCCACAAGTTCATGGAGCGCGA
GGGCCGCCGCCCCCGCCTCCTCGTCGCCAAGATGGGCCAGGACGGCCACGACCGCGGCGCCAAGGTCATCGCCA
CCGGCTTCGCCGACCTCGGCTTCGACGTCGACATCGGCCCCCTCTTCCAGACCCCCCGCGAGGTCGCCCAGCAG
GCCGTCGACGCCGACGTCCACGCCGTCGGCGTCTCCACCCTCGCCGCCGGCCACAAGACCCTCGTCCCCGAGCT
CATCAAGGAGCTCAACTCCCTCGGCCGCCCCGACATCCTCGTCATGTGCGGCGGCGTCATCCCCCCCCAGGACT
ACGAGTTCCTCTTCGAGGTCGGCGTCTCCAACGTCTTCGGCCCCGGCACCCGCATCCCCAAGGCCGCCGTCCAG
GTCCTCGACGACATCGAGAAGTGCCTCGAGAAGAAGCAGCAGTCCGTCTGATAATAGGCTGGAGCCTCGGTGGC
CATGCTTCTTGCCCCTTGGGCCTCCCCCCAGCCCCTCCTCCCCTTCCTGCACCCGTACCCCCCGCATTATTACT
CACGGTACGAGTGGTCTTTGAATAAAGTCTGAGTGGGCGGC
hMCM ORF
(SEQ ID NO: 775)
ATGTTAAGAGCTAAGAATCAGCTTTTTTTACTTTCACCTCATTACCTGAGGCAGGTAAAAGAATCATCAGGCTC
CAGGCTCATACAGCAACGACTTCTACACCAGCAACAGCCCCTTCACCCAGAATGGGCTGCCCTGGCTAAAAAGC
AGCTGAAAGGCAAAAACCCAGAAGACCTAATATGGCACACCCCGGAAGGGATCTCTATAAAACCCTTGTATTCC
AAGAGAGATACTATGGACTTACCTGAAGAACTTCCAGGAGTGAAGCCATTCACACGTGGACCATATCCTACCAT
GTATACCTTTAGGCCCTGGACCATCCGCCAGTATGCTGGTTTTAGTACTGTGGAAGAAAGCAATAAGTTCTATA
AGGACAACATTAAGGCTGGTCAGCAGGGATTATCAGTTGCCTTTGATCTGGCGACACATCGTGGCTATGATTCA
GACAACCCTCGAGTTCGTGGTGATGTTGGAATGGCTGGAGTTGCTATTGACACTGTGGAAGATACCAAAATTCT
TTTTGATGGAATTCCTTTAGAAAAAATGTCAGTTTCCATGACTATGAATGGAGCAGTTATTCCAGTTCTTGCAA
ATTTTATAGTAACTGGAGAAGAACAAGGTGTACCTAAAGAGAAACTTACTGGTACCATCCAAAATGATATACTA
AAGGAATTTATGGTTCGAAATACATACATTTTTCCTCCAGAACCATCCATGAAAATTATTGCTGACATATTTGA
ATATACAGCAAAGCACATGCCAAAATTTAATTCAATTTCAATTAGTGGATACCATATGCAGGAAGCAGGGGCTG
ATGCCATTCTGGAGCTGGCCTATACTTTAGCAGATGGATTGGAGTACTCTAGGACTGGACTCCAGGCTGGCCTG
ACAATTGATGAATTTGCACCAAGGTTGTCTTTCTTCTGGGGAATTGGAATGAATTTCTATATGGAAATAGCAAA
GATGAGAGCTGGTAGAAGACTCTGGGCTCACTTAATAGAGAAAATGTTTCAGCCTAAAAACTCAAAATCTCTTC
TTCTAAGAGCACACTGTCAGACATCTGGATGGTCACTTACTGAGCAGGATCCCTACAATAATATTGTCCGTACT
GCAATAGAAGCAATGGCAGCAGTATTTGGAGGGACTCAGTCTTTGCACACAAATTCTTTTGATGAAGCTTTGGG
TTTGCCAACTGTGAAAAGTGCTCGAATTGCCAGGAACACACAAATCATCATTCAAGAAGAATCTGGGATTCCCA
AAGTGGCTGATCCTTGGGGAGGTTCTTACATGATGGAATGTCTCACAAATGATGTTTATGATGCTGCTTTAAAG
CTCATTAATGAAATTGAAGAAATGGGTGGAATGGCCAAAGCTGTAGCTGAGGGAATACCTAAACTTCGAATTGA
AGAATGTGCTGCCCGAAGACAAGCTAGAATAGATTCTGGTTCTGAAGTAATTGTTGGAGTAAATAAGTACCAGT
TGGAAAAAGAAGACGCTGTAGAAGTTCTGGCAATTGATAATACTTCAGTGCGAAACAGGCAGATTGAAAAACTT
AAGAAGATCAAATCCAGCAGGGATCAAGCTTTGGCTGAACGTTGCCTTGCTGCACTAACCGAATGTGCTGCTAG
CGGAGATGGAAATATCCTGGCTCTTGCAGTGGATGCATCTCGGGCAAGATGTACAGTGGGAGAAATCACAGATG
CCCTGAAAAAGGTATTTGGTGAACATAAAGCGAATGATCGAATGGTGAGTGGAGCATATCGCCAGGAATTTGGA
GAAAGTAAAGAGATAACATCTGCTATCAAGAGGGTTCATAAATTCATGGAACGTGAAGGTCGCAGACCTCGTCT
TCTTGTAGCAAAAATGGGACAAGATGGCCATGACAGAGGAGCAAAAGTTATTGCTACAGGATTTGCTGATCTTG
GTTTTGATGTGGACATAGGCCCTCTTTTCCAGACTCCTCGTGAAGTGGCCCAGCAGGCTGTGGATGCGGATGTG
CATGCTGTGGGCGTAAGCACCCTCGCTGCTGGTCATAAAACCCTAGTTCCTGAACTCATCAAAGAACTTAACTC
CCTTGGACGGCCAGATATTCTTGTCATGTGTGGAGGGGTGATACCACCTCAGGATTATGAATTTCTGTTTGAAG
TTGGTGTTTCCAATGTATTTGGTCCTGGGACTCGAATTCCAAAGGCTGCCGTTCAGGTGCTTGATGATATTGAG
AAGTGTTTGGAAAAGAAGCAGCAATCTGTA
hMCM ORF
(SEQ ID NO: 776)
ATGCTGAGGGCCAAGAACCAGCTGTTTCTCCTGTCGCCCCACTACCTGAGGCAGGTGAAGGAGTCCTCCGGCAG
CAGGCTCATTCAGCAGAGGCTGTTGCACCAGCAGCAGCCCCTGCACCCAGAGTGGGCCGCCCTCGCCAAGAAGC
AGCTGAAGGGGAAGAACCCCGAGGACCTGATCTGGCATACGCCCGAGGGTATCTCCATAAAACCCCTCTACAGT
AAGAGGGACACCATGGACCTGCCCGAGGAACTGCCCGGCGTGAAGCCGTTCACGCGGGGCCCATACCCCACCAT
GTACACCTTCCGGCCGTGGACCATCAGGCAATACGCCGGCTTCAGCACCGTGGAGGAGAGCAACAAGTTCTACA
AAGACAACATCAAAGCCGGTCAGCAAGGGCTGAGCGTAGCCTTCGACCTGGCCACCCACAGGGGCTACGACTCC
GACAACCCCAGGGTGCGCGGCGACGTGGGCATGGCCGGCGTGGCCATCGACACCGTGGAAGACACCAAGATCCT
CTTCGACGGCATCCCCCTGGAAAAGATGTCCGTGTCCATGACCATGAACGGGGCCGTTATACCGGTGCTGGCCA
ACTTCATAGTCACCGGCGAGGAGCAGGGGGTCCCGAAGGAGAAGTTAACCGGCACGATTCAGAACGACATCCTG
AAAGAGTTCATGGTGAGGAACACCTATATCTTCCCCCCCGAGCCCTCCATGAAAATCATCGCCGACATCTTCGA
GTACACCGCGAAGCACATGCCCAAGTTCAACTCCATCAGCATCTCCGGATATCACATGCAGGAAGCCGGCGCCG
ACGCCATCCTGGAGCTGGCCTACACCCTGGCGGACGGACTGGAGTACAGCCGCACGGGCCTGCAGGCGGGCCTG
ACCATAGACGAATTTGCCCCGCGGCTGAGCTTTTTCTGGGGGATCGGCATGAATTTCTACATGGAGATCGCCAA
GATGCGGGCCGGCAGACGGCTGTGGGCCCATCTGATCGAAAAAATGTTCCAGCCCAAAAACAGCAAGTCCCTGC
TGCTGCGGGCCCACTGCCAGACCAGCGGCTGGAGCCTGACCGAGCAGGACCCGTACAATAACATCGTGAGGACC
GCCATCGAGGCCATGGCCGCCGTGTTCGGCGGGACGCAAAGCCTGCACACGAACTCCTTCGACGAGGCGCTCGG
CCTGCCCACCGTGAAGTCCGCTAGGATCGCCAGGAACACACAGATCATCATCCAGGAGGAGAGCGGCATCCCCA
AGGTGGCCGACCCCTGGGGCGGCTCCTACATGATGGAGTGCCTGACGAACGACGTGTACGACGCCGCCCTGAAG
CTGATCAACGAGATCGAGGAGATGGGCGGCATGGCCAAGGCCGTCGCCGAGGGCATCCCCAAGCTGCGCATCGA
GGAGTGCGCCGCCAGGCGCCAAGCCCGGATCGATAGCGGCAGCGAGGTGATCGTGGGGGTGAACAAGTACCAGC
TGGAGAAGGAGGACGCGGTCGAGGTCCTGGCCATAGACAACACGAGCGTGCGGAACAGGCAGATCGAGAAGCTC
AAGAAAATCAAGAGCAGCCGGGACCAGGCCCTGGCCGAAAGGTGCCTCGCCGCCCTCACGGAATGCGCCGCCAG
CGGCGACGGCAATATCCTGGCCCTGGCGGTCGATGCCAGCCGCGCTCGGTGCACCGTGGGGGAGATCACCGATG
CCCTCAAGAAAGTGTTCGGGGAGCACAAGGCCAACGACAGGATGGTGTCCGGCGCCTACAGGCAGGAGTTCGGC
GAAAGCAAGGAAATCACGAGCGCCATCAAGCGGGTCCATAAGTTCATGGAGAGGGAGGGCCGGAGGCCCAGGCT
GCTCGTGGCCAAAATGGGCCAGGACGGCCATGACAGGGGCGCCAAGGTGATCGCCACCGGGTTCGCCGACCTCG
GCTTCGACGTGGACATCGGGCCGCTGTTCCAGACGCCGCGGGAGGTCGCCCAGCAAGCGGTGGACGCCGACGTG
CACGCCGTCGGGGTGAGCACCCTCGCCGCTGGGCATAAGACCCTGGTGCCCGAGCTGATCAAAGAGCTCAACAG
CCTCGGCAGGCCCGACATTCTCGTTATGTGCGGCGGCGTCATCCCGCCCCAGGACTACGAGTTCCTGTTTGAGG
TCGGCGTCTCCAACGTGTTCGGCCCAGGCACCAGGATCCCCAAGGCCGCCGTGCAGGTGTTGGACGATATCGAG
AAATGCCTCGAGAAAAAGCAGCAGAGCGTC
hMCM ORF
(SEQ ID NO: 777)
ATGCTGCGGGCCAAGAACCAGCTGTTCCTGCTGAGCCCCCACTACCTGCGGCAGGTGAAGGAGAGCAGCGGCAG
CCGGCTGATCCAGCAGCGCCTCCTCCACCAGCAGCAGCCCCTCCACCCCGAGTGGGCCGCCCTCGCCAAGAAGC
AGCTCAAGGGCAAGAACCCCGAGGACCTCATCTGGCACACCCCCGAGGGCATCTCCATCAAGCCCCTCTACTCC
AAGCGCGACACCATGGACCTCCCCGAGGAGCTCCCCGGCGTCAAGCCCTTCACCCGCGGCCCCTACCCCACCAT
GTACACCTTCCGCCCCTGGACCATCCGCCAGTACGCCGGCTTCTCCACCGTCGAGGAGTCCAACAAGTTCTACA
AGGACAACATCAAGGCCGGCCAGCAGGGCCTCTCCGTCGCCTTCGACCTCGCCACCCACCGCGGCTACGACTCC
GACAACCCCCGCGTCCGCGGCGACGTCGGCATGGCCGGCGTCGCCATCGACACCGTCGAGGACACCAAGATCCT
CTTCGACGGCATCCCCCTCGAGAAGATGTCCGTCTCCATGACCATGAACGGCGCCGTCATCCCCGTCCTCGCCA
ACTTCATCGTCACCGGCGAGGAGCAGGGCGTCCCCAAGGAGAAGCTCACCGGCACCATCCAGAACGACATCCTC
AAGGAGTTCATGGTCCGCAACACCTACATCTTCCCCCCCGAGCCCTCCATGAAGATCATCGCCGACATCTTCGA
GTACACCGCCAAGCACATGCCCAAGTTCAACTCCATCTCCATCTCCGGCTACCACATGCAGGAGGCCGGCGCCG
ACGCCATCCTCGAGCTCGCCTACACCCTCGCCGACGGCCTCGAGTACTCCCGCACCGGCCTCCAGGCCGGCCTC
ACCATCGACGAGTTCGCCCCCCGCCTCTCCTTCTTCTGGGGCATCGGCATGAACTTCTACATGGAGATCGCCAA
GATGCGCGCCGGCCGCCGCCTCTGGGCCCACCTCATCGAGAAGATGTTCCAGCCCAAGAACTCCAAGTCCCTCC
TCCTCCGCGCCCACTGCCAGACCTCCGGCTGGTCCCTCACCGAGCAGGACCCCTACAACAACATCGTCCGCACC
GCCATCGAGGCCATGGCCGCCGTCTTCGGCGGCACCCAGTCCCTCCACACCAACTCCTTCGACGAGGCCCTCGG
CCTCCCCACCGTCAAGTCCGCCCGCATCGCCCGCAACACCCAGATCATCATCCAGGAGGAGTCCGGCATCCCCA
AGGTCGCCGACCCCTGGGGCGGCTCCTACATGATGGAGTGCCTCACCAACGACGTCTACGACGCCGCCCTCAAG
CTCATCAACGAGATCGAGGAGATGGGCGGCATGGCCAAGGCCGTCGCCGAGGGCATCCCCAAGCTCCGCATCGA
GGAGTGCGCCGCCCGCCGCCAGGCCCGCATCGACTCCGGCTCCGAGGTCATCGTCGGCGTCAACAAGTACCAGC
TCGAGAAGGAGGACGCCGTCGAGGTCCTCGCCATCGACAACACCTCCGTCCGCAACCGCCAGATCGAGAAGCTC
AAGAAGATCAAGTCCTCCCGCGACCAGGCCCTCGCCGAGCGCTGCCTCGCCGCCCTCACCGAGTGCGCCGCCTC
CGGCGACGGCAACATCCTCGCCCTCGCCGTCGACGCCTCCCGCGCCCGCTGCACCGTCGGCGAGATCACCGACG
CCCTCAAGAAGGTCTTCGGCGAGCACAAGGCCAACGACCGCATGGTCTCCGGCGCCTACCGCCAGGAGTTCGGC
GAGTCCAAGGAGATCACCTCCGCCATCAAGCGCGTCCACAAGTTCATGGAGCGCGAGGGCCGCCGCCCCCGCCT
CCTCGTCGCCAAGATGGGCCAGGACGGCCACGACCGCGGCGCCAAGGTCATCGCCACCGGCTTCGCCGACCTCG
GCTTCGACGTCGACATCGGCCCCCTCTTCCAGACCCCCCGCGAGGTCGCCCAGCAGGCCGTCGACGCCGACGTC
CACGCCGTCGGCGTCTCCACCCTCGCCGCCGGCCACAAGACCCTCGTCCCCGAGCTCATCAAGGAGCTCAACTC
CCTCGGCCGCCCCGACATCCTCGTCATGTGCGGCGGCGTCATCCCCCCCCAGGACTACGAGTTCCTCTTCGAGG
TCGGCGTCTCCAACGTCTTCGGCCCCGGCACCCGCATCCCCAAGGCCGCCGTCCAGGTCCTCGACGACATCGAG
AAGTGCCTCGAGAAGAAGCAGCAGTCCGTC
hMCM ORF
(SEQ ID NO: 778)
ATGCTGCGGGCCAAGAACCAGCTGTTCCTGCTGAGCCCCCACTACCTGCGGCAGGTGAAGGAGAGCAGCGGCAG
CCGGCTGATCCAGCAGCGCCTCCTCCACCAGCAGCAGCCCCTCCACCCCGAGTGGGCCGCCCTCGCCAAGAAGC
AGCTCAAGGGCAAGAACCCCGAGGACCTCATCTGGCACACCCCCGAGGGCATCTCCATCAAGCCCCTCTACTCC
AAGCGCGACACCATGGACCTCCCCGAGGAGCTCCCCGGCGTCAAGCCCTTCACCCGCGGCCCCTACCCCACCAT
GTACACCTTCCGCCCCTGGACCATCCGCCAGTACGCCGGCTTCTCCACCGTCGAGGAGTCCAACAAGTTCTACA
AGGACAACATCAAGGCCGGCCAGCAGGGCCTCTCCGTCGCCTTCGACCTCGCCACCCACCGCGGCTACGACTCC
GACAACCCCCGCGTCCGCGGCGACGTCGGCATGGCCGGCGTCGCCATCGACACCGTCGAGGACACCAAGATCCT
CTTCGACGGCATCCCCCTCGAGAAGATGTCCGTCTCCATGACCATGAACGGCGCCGTCATCCCCGTCCTCGCCA
ACTTCATCGTCACCGGCGAGGAGCAGGGCGTCCCCAAGGAGAAGCTCACCGGCACCATCCAGAACGACATCCTC
AAGGAGTTCATGGTCCGCAACACCTACATCTTCCCCCCCGAGCCCTCCATGAAGATCATCGCCGACATCTTCGA
GTACACCGCCAAGCACATGCCCAAGTTCAACTCCATCTCCATCTCCGGCTACCACATGCAGGAGGCCGGCGCCG
ACGCCATCCTCGAGCTCGCCTACACCCTCGCCGACGGCCTCGAGTACTCCCGCACCGGCCTCCAGGCCGGCCTC
ACCATCGACGAGTTCGCCCCCCGCCTCTCCTTCTTCTGGGGCATCGGCATGAACTTCTACATGGAGATCGCCAA
GATGCGCGCCGGCCGCCGCCTCTGGGCCCACCTCATCGAGAAGATGTTCCAGCCCAAGAACTCCAAGTCCCTCC
TCCTCCGCGCCCACTGCCAGACCTCCGGCTGGTCCCTCACCGAGCAGGACCCCTACAACAACATCGTCCGCACC
GCCATCGAGGCCATGGCCGCCGTCTTCGGCGGCACCCAGTCCCTCCACACCAACTCCTTCGACGAGGCCCTCGG
CCTCCCCACCGTCAAGTCCGCCCGCATCGCCCGCAACACCCAGATCATCATCCAGGAGGAGTCCGGCATCCCCA
AGGTCGCCGACCCCTGGGGCGGCTCCTACATGATGGAGTGCCTCACCAACGACGTCTACGACGCCGCCCTCAAG
CTCATCAACGAGATCGAGGAGATGGGCGGCATGGCCAAGGCCGTCGCCGAGGGCATCCCCAAGCTCCGCATCGA
GGAGTGCGCCGCCCGCCGCCAGGCCCGCATCGACTCCGGCTCCGAGGTCATCGTCGGCGTCAACAAGTACCAGC
TCGAGAAGGAGGACGCCGTCGAGGTCCTCGCCATCGACAACACCTCCGTCCGCAACCGCCAGATCGAGAAGCTC
AAGAAGATCAAGTCCTCCCGCGACCAGGCCCTCGCCGAGCGCTGCCTCGCCGCCCTCACCGAGTGCGCCGCCTC
CGGCGACGGCAACATCCTCGCCCTCGCCGTCGACGCCTCCCGCGCCCGCTGCACCGTCGGCGAGATCACCGACG
CCCTCAAGAAGGTCTTCGGCGAGCACAAGGCCAACGACCGCATGGTCTCCGGCGCCTACCGCCAGGAGTTCGGC
GAGTCCAAGGAGATCACCTCCGCCATCAAGCGCGTCCACAAGTTCATGGAGCGCGAGGGCCGCCGCCCCCGCCT
CCTCGTCGCCAAGATGGGCCAGGACGGCCACGACCGCGGCGCCAAGGTCATCGCCACCGGCTTCGCCGACCTCG
GCTTCGACGTCGACATCGGCCCCCTCTTCCAGACCCCCCGCGAGGTCGCCCAGCAGGCCGTCGACGCCGACGTC
CACGCCGTCGGCGTCTCCACCCTCGCCGCCGGCCACAAGACCCTCGTCCCCGAGCTCATCAAGGAGCTCAACTC
CCTCGGCCGCCCCGACATCCTCGTCATGTGCGGCGGCGTCATCCCCCCCCAGGACTACGAGTTCCTCTTCGAGG
TCGGCGTCTCCAACGTCTTCGGCCCCGGCACCCGCATCCCCAAGGCCGCCGTCCAGGTCCTCGACGACATCGAG
AAGTGCCTCGAGAAGAAGCAGCAGTCCGTC

### Other Embodiments

[1696] It is to be understood that the words that have been used are words of description rather than limitation, and that changes can be made within the purview of the appended claims without departing from the true scope and spirit of the disclosure in its broader aspects.

[1697] While the present disclosure has been described at some length and with some particularity with respect to the several described embodiments, it is not intended that it should be limited to any such particulars or embodiments or any particular embodiment, but it is to be construed with references to the appended claims so as to provide the broadest possible interpretation of such claims in view of the prior art and, therefore, to effectively encompass the intended scope of the disclosure.

[1698] All publications, patent applications, patents, and other references mentioned herein are incorporated by reference in their entirety. In case of conflict, the present specification, including definitions, will control. In addition, section headings, the materials, methods, and examples are illustrative only and not intended to be limiting.

1-15. (canceled)

16. A lipid nanoparticle comprising a messenger RNA (mRNA) and a compound having the formula: [chemical structure]
wherein the mRNA comprises:
(i) a 5′-terminal cap;
(ii) a 5′ untranslated region (UTR);
(iii) an open reading frame (ORF) encoding the human methylmalonyl-CoA mutase (MCM) polypeptide of SEQ ID NO:208, SEQ ID NO:209, SEQ ID NO:210, SEQ ID NO:211, SEQ ID NO:212, or SEQ ID NO:213;
(iv) a 3′ UTR; and
(v) a poly-A tail.

17. The lipid nanoparticle of claim 16, wherein the ORF encodes the human MCM polypeptide of SEQ ID NO:213.

18. The lipid nanoparticle of claim 17, wherein the ORF is at least 80% identical to the nucleotide sequence of SEQ ID NO:732.

19. The lipid nanoparticle of claim 17, wherein the ORF is at least 85% identical to the nucleotide sequence of SEQ ID NO:732.

20. The lipid nanoparticle of claim 17, wherein the ORF is at least 90% identical to the nucleotide sequence of SEQ ID NO:732.

21. The lipid nanoparticle of claim 17, wherein the ORF is at least 95% identical to the nucleotide sequence of SEQ ID NO:732.

22. The lipid nanoparticle of claim 17, wherein the ORF is at least 98% identical to the nucleotide sequence of SEQ ID NO:732.

23. The lipid nanoparticle of claim 17, wherein the ORF is at least 99% identical to the nucleotide sequence of SEQ ID NO:732.

24. The lipid nanoparticle of claim 17, wherein the ORF is 100% identical to the nucleotide sequence of SEQ ID NO:732.

25. The lipid nanoparticle of claim 18, wherein the 5′ UTR comprises the nucleotide sequence of SEQ ID NO:215.

26. The lipid nanoparticle of claim 18, wherein the mRNA comprises the miR-142-3p binding site depicted in SEQ ID NO:722.

27. The lipid nanoparticle of claim 18, wherein the 5′ terminal cap is Cap1.

28. The lipid nanoparticle of claim 18, wherein the poly-A tail is 100 residues in length.

29. The lipid nanoparticle of claim 18, wherein at least 95% of uridines in the mRNA are 5-methoxyuridines.

30. The lipid nanoparticle of claim 24, wherein the 5′ UTR comprises the nucleotide sequence of SEQ ID NO:215.

31. The lipid nanoparticle of claim 24, wherein the mRNA comprises the miR-142-3p binding site depicted in SEQ ID NO:722.

32. The lipid nanoparticle of claim 24, wherein the 5′ terminal cap is Cap1.

33. The lipid nanoparticle of claim 24, wherein the poly-A tail is 100 residues in length.

34. The lipid nanoparticle of claim 24, wherein at least 95% of uridines in the mRNA are 5-methoxyuridines.

35. The lipid nanoparticle of claim 24, wherein the 5′ UTR comprises the nucleotide sequence of SEQ ID NO:215, wherein the mRNA comprises the miR-142-3p binding site depicted in SEQ ID NO:722, wherein the 5′ terminal cap is Cap1, wherein the poly-A tail is 100 residues in length, and wherein at least 95% of uridines in the mRNA are 5-methoxyuridines.

36. The lipid nanoparticle of claim 16, further comprising a phospholipid, a structural lipid, and a PEG lipid.

37. The lipid nanoparticle of claim 24, further comprising a phospholipid, a structural lipid, and a PEG lipid.

38. The lipid nanoparticle of claim 35, further comprising a phospholipid, a structural lipid, and a PEG lipid.

39. The lipid nanoparticle of claim 36, wherein the phospholipid is 1,2-distearoyl-sn-glycero-3-phosphocholine (DSPC) and the structural lipid is cholesterol.

40. The lipid nanoparticle of claim 37, wherein the phospholipid is 1,2-distearoyl-sn-glycero-3-phosphocholine (DSPC) and the structural lipid is cholesterol.

41. The lipid nanoparticle of claim 38, wherein the phospholipid is 1,2-distearoyl-sn-glycero-3-phosphocholine (DSPC) and the structural lipid is cholesterol.

42. A method of treating methylmalonic acidemia in a human subject in need thereof, the method comprising administering to the human subject an effective amount of the lipid nanoparticle of claim 16.

43. A method of treating methylmalonic acidemia in a human subject in need thereof, the method comprising administering to the human subject an effective amount of the lipid nanoparticle of claim 17.

44. A method of treating methylmalonic acidemia in a human subject in need thereof, the method comprising administering to the human subject an effective amount of the lipid nanoparticle of claim 24.

45. A method of treating methylmalonic acidemia in a human subject in need thereof, the method comprising administering to the human subject an effective amount of the lipid nanoparticle of claim 35.

The application's sequence listing, which the Patent Office published only in electronic form, follows.

SEQUENCE LISTING (774 sequences)

SEQ ID NO: 1 - DNA, 2250 bp, Artificial Sequence
  Codon optimized sequence that encodes an MCM polypeptide with the I671V mutation
atgcttagggcaaaaaaccaattattcctgctgtcgcctcactatctgcgtcaagttaaagagagcagcgggtcccggttaattcagcagcggctactgcatcaacagcagcctctgcatccagagtgggcagccctggccaaaaagcagctgaaggggaagaatcctgaggacttgatatggcacacacctgagggaatcagtatcaaacctctgtattcaaaaagggacactatggacctgcccgaggaactgccaggagtcaagccgtttacacgcgggccctatccaacaatgtatactttcagaccgtggactattcggcagtatgcaggatttagtactgtcgaagagtccaataagttctataaggacaatatcaaggccggccagcaggggctgtctgtagccttcgatctagctactcacaggggctacgattctgacaatccccgggtcaggggagacgtcggtatggcgggagtggcgattgatactgtggaagatactaagattttgtttgatggaatcccactggaaaagatgagtgtttcaatgacgatgaatggtgccgtcataccagtactcgcgaacttcattgttacgggggaggaacaaggtgtgcccaaggagaagctcaccgggacaatacaaaatgatattttgaaggagttcatggtccgcaacacttacatctttccgcccgaaccaagcatgaaaataattgccgacattttcgagtatacagctaaacacatgcctaagttcaacagcatttctattagcggctatcacatgcaggaggcgggcgcagatgcaatactagagttagcatacaccctcgcagatggactggaatattcccgcacgggtctccaggccgggttaacaatcgacgagtttgccccacggctatcttttttttggggtattggcatgaatttctacatggaaattgcgaagatgcgagcaggaagaagactctgggctcacctgatcgaaaaaatgttccaaccgaagaattcaaagtctttactgctgagagcccattgtcagacatccggatggagcttgaccgagcaagatccttacaacaatatcgtgaggaccgcgatagaggcaatggctgccgtcttcggtggcacacagagcctgcacacaaatagctttgatgaggccctcggtctgcccacagtgaaaagtgctagaatcgcgcgaaatactcagattataatacaggaggaatcaggaatccctaaagtcgcagatccgtggggtggaagctacatgatggaatgtctgacaaatgacgtatatgatgcagccctgaagctgataaacgagatagaggagatgggcgggatggcaaaggccgtagccgagggaatccccaagctgaggatcgaagagtgtgcagccaggagacaggcacgaatcgattcaggctctgaggtcatagtaggggttaacaaataccagctcgaaaaggaggatgcggtggaggttcttgctatcgacaatacatccgtccgcaacaggcaaatcgagaaactgaagaagatcaagtctagcagggatcaggccctagccgaaagatgtctggctgcactcacagagtgcgctgccagtggagatggcaatatacttgctctcgccgtggacgcaagtcgggcccggtgcacggtgggcgagatcaccgatgcgcttaaaaaggtgtttggtgaacataaagccaatgacagaatggtgagcggcgcataccggcaggaatttggcgagtctaaagagataacctcagcaatcaagcgggtacataagttcatggagagagagggccggcgcccccgtcttctggtcgccaagatgggccaggatggacacgaccgcggcgctaaggtaattgccaccggtttcgcagatctcggtttcgatgtggatatcggtcctctgtttcaaaccccccgggaggtcgctcaacaagccgttgatgccgacgtgcatgcagtcggcgtgtctaccctggccgcggggcataaaacactcgtgccagagctcataaaggagctgaatagcttaggtagacctgatatacttgttatgtgcggaggggttatccctccgcaggactacgagtttctgttcgaggtgggggtgtccaatgtgttcggacctggaacacgcattcccaaagccgccgtgcaggttctcgacgacattgaaaagtgcctggaaaaaaagcagcagtcagtt

SEQ ID NO: 2 - DNA, 2250 bp, Artificial Sequence
  Codon optimized sequence that encodes an MCM polypeptide with the I671V mutation
atgctccgggccaagaatcaactgtttttactatccccccactatttgaggcaggtgaaagagagttccggcagcaggctgatacagcaacggcttctgcaccagcagcaaccactccacccagagtgggctgcactagcaaagaagcagctgaagggaaagaatcctgaggatctgatttggcatacccctgaggggattagcatcaagcccttatacagtaagagagacacgatggacctccccgaagaacttcctggcgttaaaccttttaccagagggccttaccctactatgtatacttttcgaccctggactatcagacagtatgccggtttctccactgtcgaggagagtaataaattctataaagacaacatcaaagccgggcaacagggcctgtctgtcgcatttgacttggccacacataggggctatgattctgataacccaagagtgcgcggggatgtgggtatggctggtgtggctatcgacaccgtggaagatactaaaattctctttgacggaatcccactggaaaaaatgagcgtcagtatgacaatgaacggcgccgtcattcctgttctcgctaactttattgtcaccggagaagagcaaggcgtaccaaaagagaagttgaccgggaccatccagaacgacattttgaaagaatttatggtgaggaatacatatatttttcctcccgaaccttcgatgaaaataatcgccgacattttcgagtatactgctaagcacatgcctaaatttaattctatatcaatttccggatatcacatgcaagaagctggggcagatgccatcttggaactcgcatataccttggcggatggcttggagtatagcaggacaggcctccaggctggactcacaatcgacgagtttgccccacggctgagttttttttggggcattggcatgaatttctacatggaaatcgcgaagatgagggctggccgccggctgtgggcgcatctgatagaaaaaatgttccagccaaagaattccaagtctctgctgctgcgcgcacactgtcagacgtctgggtggagtcttacagagcaagatccctacaacaacatcgttcgaactgccatcgaggccatggcagctgtgttcggagggacacagagcctgcacacaaacagcttcgatgaagctctgggcctgccaaccgtcaaatccgcaagaatagcacgaaacacacaaattataatacaggaagaaagtggaatcccaaaggtagcagatccttggggcggcagttacatgatggagtgtctcacaaacgacgtctacgacgctgctctgaaactcatcaacgagatagaagaaatggggggaatggcgaaagctgtagctgaggggatcccgaagctgcgcatagaagaatgcgccgctaggcgacaggctagaatcgattccggttctgaagtgatcgtcggcgttaataaatatcagctagagaaagaggatgcagtggaggtcctggccattgataataccagtgtgcgcaaccggcagattgagaagctgaaaaagatcaaatccagtagagatcaagctttggccgaaaggtgtctggctgccttgaccgaatgtgccgcaagcggagatggaaatattctggctttagcggtggacgcgagtcgggcccgttgtaccgtgggggagataaccgatgcgctgaagaaagtgtttggagaacataaggccaacgaccggatggtgtctggcgcctaccgccaggaatttggcgagtcgaaagaaattacctctgctattaaacgcgtacacaaattcatggaacgggaagggcggagaccgcgccttctggtcgccaagatgggccaagacgggcacgataggggtgcaaaggtgattgctactggcttcgctgatttgggctttgatgtggacatcggaccgctgttccagacgccgcgagaggtcgcccaacaggccgtcgacgctgacgttcacgctgtaggggtgagcaccctggccgccggtcacaaaacactggtgcctgaactgattaaagagctgaattcccttgggcgccctgacattcttgtaatgtgcggcggtgtcatacccccacaggactacgaatttctgttcgaggtgggtgtgtctaacgtgttcggcccgggcacaagaattccgaaggccgccgtgcaggttctggacgacattgagaaatgcctggaaaagaagcaacagagcgtt

SEQ ID NO: 3 - DNA, 2250 bp, Artificial Sequence
  Codon optimized sequence that encodes an MCM polypeptide with the I671V mutation
atgttacgggcaaagaaccaattgttccttctcagcccccactatctgcgacaggtgaaagagtcatccggatcccggctgatccagcagcggctgcttcaccagcagcagccactacatccggaatgggctgcgctagctaaaaaacagctaaaaggaaaaaatcccgaggatctaatttggcatactcccgagggcatcagtatcaaacctttgtactccaagagagacaccatggatctaccagaggagttaccaggcgttaagcctttcactaggggaccatatcccactatgtacaccttcagaccgtggaccatccgacagtatgccggatttagcaccgtggaggagagcaacaagttttacaaggacaatattaaggcggggcagcagggactttctgtcgccttcgatttggcgactcacagggggtatgacagcgacaatcctagggtgcgcggcgatgtggggatggccggcgtggccatcgataccgttgaagacactaagatcctgttcgacggtattcctctcgagaagatgagcgtaagcatgaccatgaatggcgccgtgattcctgtcttggccaacttcattgttacaggagaggaacaaggggtgcctaaagaaaaactgaccgggactatccagaatgatatccttaaggagttcatggtgcgcaacacttatatcttcccgccggagccgtctatgaaaattatagctgatatcttcgaatacacggccaagcacatgcccaaatttaacagcatctcaatatctggatatcacatgcaagaggccggagctgacgcgattttagagttagcttacacattggcagacgggttggagtatagcagaaccgggttgcaggcaggcctcaccatcgacgagttcgctcctaggctttcctttttttggggaattggtatgaatttctatatggagatcgccaaaatgcgagccggccgtaggctttgggcacacctcattgaaaagatgttccagccaaaaaactccaaatcgctcctcttgagggcacactgccagacatccgggtggtctctgactgaacaggatccctacaataacatcgtccggactgcaatcgaggcaatggccgcagtcttcggagggacccaatccctccacacaaactcctttgatgaagctctgggcctcccgacagtgaagtccgcccgcatcgcgcggaacacccaaattataattcaggaagagtccggcattccaaaggtggccgacccctggggcggctcttacatgatggagtgtctgacaaatgacgtttacgatgcagctctgaagcttatcaatgagatagaggagatggggggcatggcgaaggccgtggccgaaggaattcccaagctccgcatcgaggagtgtgctgcaagaaggcaggctaggatcgactccggctcagaagtgatcgtgggtgtgaacaaataccagctggagaaagaagacgccgtggaagtgctggctatcgataacacgtcagtgcgcaatcgacaaatagaaaagctgaagaagattaaatccagcagggaccaagcactcgctgagcggtgcctcgcagcgttgaccgagtgcgccgctagcggcgacggcaacatccttgcattagcagttgacgcctcacgagccaggtgtacagtgggggaaataaccgatgctctcaaaaaagttttcggtgaacacaaggctaatgaccgaatggtcagcggtgcataccggcaggaattcggagagtcaaaagagatcaccagtgccatcaagagggtacataaattcatggaaagggagggcaggcggccccgcctgttggtagccaagatgggacaggacgggcacgaccgaggagccaaggtgatagccacgggttttgccgatctgggttttgatgtggacatcggcccactgtttcagaccccccgtgaggttgcccagcaagctgtggacgccgatgtgcacgcggtgggagtttccaccctagcagccggtcataagacacttgttccggaactgatcaaagagctgaactccctcggacgtccagacattttggtcatgtgtgggggcgtgattcctccacaggactatgaatttctgttcgaggtcggagtcagtaacgtgttcgggccaggcacccgaatcccaaaggctgcagttcaggtactggacgatattgaaaaatgtctcgaaaaaaaacagcagtctgtg

SEQ ID NO: 4 - DNA, 2250 bp, Artificial Sequence
  Codon optimized sequence that encodes an MCM polypeptide with the I671V mutation
atgctgagggccaaaaatcagctcttcctgctttctcctcactacttgcggcaggttaaagaatctagcgggagtcgtttgattcagcagagacttctccaccagcagcagcctctccatccggagtgggcggcccttgccaagaagcagttgaagggcaagaatccggaggacttgatctggcacacgccggaggggatcagcatcaaaccgctgtactccaaaagggacactatggatctgcctgaggagctgccaggagtgaagcctttcacacgcgggccttatcctaccatgtacaccttccgtccgtggacaatccgccagtacgcaggtttctctactgtcgaggagagcaacaaattttacaaggacaatatcaaagcagggcaacagggcctgtctgtagctttcgacctggctacacatcgtgggtacgattccgataaccccagggtgcgaggagatgttggcatggctggcgtggccatcgatactgttgaagacacaaaaattctatttgacgggatacctcttgagaagatgagcgtgagcatgacgatgaatggagccgtcatccccgtcctggcgaattttatcgtgactggtgaagaacaaggagtaccaaaagaaaaactaactggcacaattcagaacgacattctcaaggaattcatggtgcgaaatacctacatcttccctccagaaccatccatgaaaatcatcgctgatattttcgagtacaccgcaaagcacatgcctaaatttaactctattagcattagtggatatcacatgcaggaagccggcgcagatgcgatccttgaattagcctacacactagctgatggcctcgagtactccagaacaggcctacaagcgggactgaccattgatgaatttgctccccgcctgagcttcttttggggcattgggatgaatttctatatggaaatcgccaagatgcgggctggccgtagattatgggcccaccttatcgaaaagatgttccagcccaagaactcgaaaagtttgctccttcgagctcactgtcagacctcaggctggtccctgaccgagcaggacccgtacaataacatcgtcagaaccgccatcgaggccatggccgctgtctttggaggcacccagtccttgcacaccaatagttttgacgaggccctgggtctgcccaccgtcaagagcgccagaattgcaagaaacacacagatcatcatccaggaagaaagcggtatcccgaaggtggcagacccctggggtggctcttacatgatggaatgcctcacgaatgacgtgtacgacgcagcgttaaaactcattaatgagatcgaagaaatggggggcatggcaaaggctgtcgcagaaggaatccctaagctgcgcatagaggaatgcgcggcccggaggcaggcacgcatcgactccggctccgaggtaattgtaggcgtgaataagtaccagctggagaaagaagatgctgttgaagttctcgctatagacaataccagcgttcggaacaggcagattgagaagctaaagaaaatcaagtcatcccgtgaccaggccctggccgaacggtgtctcgctgcactcaccgaatgtgccgcttcaggggatggcaatatcttggcgctggccgtagacgccagccgcgcaagatgtactgtcggtgagattacagacgcactcaagaaggtcttcggagagcacaaggccaatgatcgcatggtcagcggagcataccgtcaagagttcggagagagtaaggagattacatcagctatcaagcgggtccacaagtttatggaaagggagggaaggcgcccacgacttcttgtcgccaagatggggcaggacggccacgacagaggcgccaaagtcatcgctacgggcttcgcagatttgggatttgatgtcgatattggacctctctttcagacgccgcgcgaggtggctcagcaagccgtggatgcagacgtgcacgccgttggggtatccacgctcgccgcagggcacaagactctcgtacccgagttgattaaggagctgaatagtctcgggcggccagacatcctcgtgatgtgtggcggcgtaattcctccccaagattacgagtttctctttgaggtgggagtttccaatgtatttggaccgggcacccggattcctaaggcagccgtgcaagtcttggacgacattgaaaagtgtctagagaaaaaacagcaaagcgtg

SEQ ID NO: 5 - DNA, 2250 bp, Artificial Sequence
  Codon optimized sequence that encodes an MCM polypeptide with the I671V mutation
atgcttagagcgaaaaaccagctgttcctgcttagcccacactacctacggcaggtcaaggaaagttctggttcacgtctcatacagcagagactcttacaccagcagcagccactgcacccagagtgggcagccttggcgaagaagcagctgaaaggaaagaatcctgaagatcttatctggcacaccccagaaggcatctcaatcaagcctctgtactcaaagagagatactatggatttgcccgaagagctgcccggcgtcaagccttttactcgaggcccttatccgaccatgtacacctttcgtccgtggaccatccgtcagtacgctggattctctacagtcgaagaaagcaataagttctataaggacaacatcaaagccggccagcagggtctgtccgtggcgtttgacctggccactcatcggggctacgatagtgataacccccgggtcagaggggatgtcggaatggctggcgtagccattgacaccgtggaggacaccaaaattctatttgatggcatccccttggaaaagatgagtgtttccatgaccatgaatggagccgtcatccccgtgctggcaaattttattgtaacaggggaagagcagggagtgcctaaggagaagttaacgggtaccattcaaaacgatatattgaaagagtttatggttcgaaatacctatatcttcccccctgagccatctatgaaaatcatagcagacatatttgagtacactgcgaaacacatgcccaaattcaacagcatctctatcagcggctaccacatgcaagaggccggagctgatgctatcttggaactggcgtacaccctggcggacggtctggagtactcccgtaccggactccaggccggcctgaccatcgacgaatttgcccctaggttatcatttttttggggaattggcatgaacttttatatggagatcgcaaaaatgcgggccggaagaaggctttgggcccacctcattgaaaaaatgttccaaccgaagaacagtaaatctcttctcctgcgggctcactgccagacttctgggtggtcccttactgagcaagatccctacaataacatcgttagaacagcaatcgaagcaatggccgcagtttttggcggaacgcagtccctgcataccaatagcttcgatgaggcgctcggattaccaactgtgaaatccgcaagaatcgctcgcaatacccagatcatcattcaggaggagagtgggattcctaaggtggcagatccatggggcggctcgtacatgatggaatgccttaccaacgacgtgtacgatgctgctctgaagctcattaatgagatcgaagaaatggggggaatggccaaagcggtggcagagggcattccaaagctccgcatcgaggaatgtgctgcaaggaggcaggccaggatcgattccggaagcgaggtcattgttggggtgaataagtatcagctggaaaaggaggatgctgtggaagtgctggcaattgataacactagcgtgaggaaccgtcagatcgagaagctgaaaaagataaagagctcgcgagaccaagccttagcagagcggtgccttgcggcactaacagaatgtgctgccagtggggatggaaacattcttgcactggctgtcgacgccagtcgagcaaggtgtacagtgggagagatcacagacgctttgaaaaaagtgttcggagagcacaaggcgaacgaccgcatggtgtcaggagcctaccgccaggaattcggcgaaagtaaagagattacttcagccattaagagggtccacaagtttatggaacgtgagggcaggcggcccagattactcgtggccaagatgggtcaagacggccacgataggggtgcaaaagtgattgcaaccggcttcgcagaccttggatttgatgtggacattgggccactttttcagacccctagagaagtggcacagcaggcagttgatgccgatgtacatgccgtgggagttagtaccctcgcggctggccacaagacactagtacctgagcttattaaagagctgaatagcctcggtaggcctgatatccttgtgatgtgtggcggcgttatacctccacaggattacgagttccttttcgaggttggtgtttcaaacgtctttggtcctggcacgcgtatacctaaagcagcagtgcaagttttggatgacattgagaaatgtctggaaaagaaacaacagtcagtg

SEQ ID NO: 6 - DNA, 2250 bp, Artificial Sequence
  Codon optimized sequence that encodes an MCM polypeptide with the I671V mutation
atgctgcgcgctaagaatcagctgttcctgctctctcctcattatctccgccaggttaaagaaagctccgggtctagactcattcagcagaggttgctgcaccaacagcagcctctgcacccagaatgggctgcactggccaagaagcagcttaaagggaaaaacccggaagacctgatttggcatacccccgaggggattagcattaaaccattgtattccaaacgagatacgatggatctgcccgaggagctgcccggcgtgaagccttttacaaggggtccttatcccactatgtatacatttagaccctggaccattcgccagtacgccggatttagtacagtcgaggagagcaacaaattttacaaggacaacataaaagctgggcaacagggcctgagtgtcgcattcgacctcgccactcaccgaggatacgactccgataatccgcgggttcgcggtgatgtgggcatggcaggagtcgcaattgatacggtggaggacaccaaaatcctgttcgacggtatccccctggagaaaatgagcgtcagtatgacaatgaatggagccgtgattccagtcttggccaatttcattgtaacaggagaggaacagggcgtccctaaggagaaactaacagggaccattcagaacgacatacttaaggagtttatggtgcggaacacctatatctttcccccggagccttcaatgaagattatcgcggatatttttgaatacacagcaaagcatatgccaaaattcaatagcataagcatcagcggttatcacatgcaggaagctggggccgacgccatcctggagcttgcttatactctggcggatggcctcgagtactcgcgcactggattgcaggccggcttgacaattgacgagttcgcccccagacttagtttcttttggggaatcggtatgaacttttatatggaaattgccaagatgcgcgccggcaggcgcctgtgggcgcacctgattgaaaagatgtttcaacccaagaacagtaagtcactgctcttgcgggcccattgccagactagcggatggagcctgaccgagcaggatccgtacaacaacattgttcggactgccatcgaggccatggcggccgtgtttggggggacacagagcctccatacaaattccttcgacgaggctctcggactgccgacagtgaaatctgctcggattgcccgcaatacacaaatcataattcaggaggagtcaggtataccaaaggtggccgatccttggggaggcagctatatgatggagtgcctaaccaacgatgtgtacgacgcagctctgaagctcattaacgagatcgaggaaatgggcggtatggccaaggccgtggctgagggtattcccaaacttcgcatcgaagagtgtgccgcgaggcgccaggctcgaattgactccggaagtgaggtgatcgttggagtcaataagtaccagcttgagaaggaagacgctgttgaggtcttagccattgacaatacctcagttagaaatcgccagattgaaaaactgaaaaaaatcaagtcctcgcgcgaccaggctctcgctgagcgatgcctcgcggcactgacagagtgtgctgcctcgggcgacgggaatattctcgccttggccgtggacgcctcacgcgcgcgatgtaccgtcggggagattacagatgcattgaagaaagtgtttggagagcacaaagcgaatgaccgcatggtatccggagcttatcgtcaggagttcggtgagtcgaaagaaattacctcagccattaaaagagtgcataaattcatggaaagggaagggaggaggccccgcctacttgtggctaaaatggggcaggacggccacgacagaggcgctaaagtaatcgccacaggcttcgcagacttgggctttgacgtcgacatcggccctctcttccaaacccccagggaggtggcccagcaggccgttgatgctgacgtgcatgcagtcggagtatcaacattagccgccggccacaagacactcgtcccagaattaattaaagaactgaatagtctcgggcggccagacattttggtcatgtgcggaggggtgattccgcctcaggattatgagtttctattcgaagtcggagtgagtaatgtcttcggcccaggtaccaggatacccaaggctgcggtgcaggtcctcgatgacattgagaagtgcctggagaagaaacagcagagcgtc

SEQ ID NO: 7 - DNA, 2250 bp, Artificial Sequence
  Codon optimized sequence that encodes an MCM polypeptide with the I671V mutation
atgctacgcgccaagaatcagctctttctgctgtctccgcactacttgcgacaggttaaagagtcttcgggctcccggctgattcagcagcgcctgctacaccagcaacaacctctgcacccagaatgggctgctttggcaaaaaagcaattgaaaggtaaaaaccccgaggacctcatttggcatacccccgagggaattagtataaagccattgtacagtaagagagatacaatggatttaccagaggaactccccggggtgaaaccattcacaaggggtccatacccaaccatgtacaccttcagaccatggactatccggcagtacgctgggttctcaacagtggaagagtcaaacaagttttataaggacaatatcaaagctggccagcagggtttgtcagtggcttttgatctagccacgcaccgtggctatgatagcgacaacccaagggtgcgaggggatgtcggcatggccggcgtcgccatagatacagtggaagacaccaaaatcctgtttgacggaatacctttggagaaaatgagcgtcagcatgaccatgaatggggctgtcattcctgtgttggccaactttatcgtcaccggtgaggagcagggcgttccaaaagagaagcttaccggaactattcagaacgatatcctgaaagagtttatggtgcgtaacacctacatttttccccccgagccatctatgaagatcatcgcggacatattcgaatatacggcaaagcatatgcctaagtttaacagcatctcgatcagcggctatcatatgcaggaagcaggggccgatgccatcctcgagctcgcttataccctggccgacggtctggaatattcccgtacaggcctacaagccggtttgaccatcgatgagttcgcacccagattatcttttttttgggggattggaatgaatttttacatggaaatagcaaagatgcgggctggacgtaggctgtgggctcaccttattgagaaaatgtttcagccgaagaactcaaaatcgctcttgctgagagctcattgccagacttccgggtggtctctgactgaacaggacccttataacaatatcgtccgtactgctattgaggcaatggccgcagtgtttggcggtacccagtcattgcatacaaactcattcgacgaagctctgggactcccaacggtaaaatcagcacgcattgctaggaacacacagatcatcattcaggaagaatccggaattccaaaggtggccgatccttggggaggctcttatatgatggagtgcctgacgaacgatgtgtatgatgccgccctcaagcttattaacgaaatcgaggaaatggggggcatggccaaagctgtagcggagggtatacctaagttgcgcattgaagaatgcgccgctcgtagacaggccagaattgattctggctcggaagtgattgtgggcgtaaacaaataccagctcgagaaggaggacgccgttgaggttttggcaatcgacaatactagcgtgcgcaaccgccagatagaaaagctgaaaaagatcaagtctagcagagaccaagctcttgccgagcgctgtctggctgcactcactgagtgtgccgcaagtggggacggaaacattctggccctagctgtagacgcttcccgcgcgaggtgtacggtcggcgaaatcacagatgccctgaaaaaagtgttcggggaacataaggcaaatgataggatggtgtcgggggcctaccgtcaagaatttggagaatccaaggagattaccagcgccataaaaagggtgcataagttcatggagagagaggggagacgccctaggctgctcgttgctaaaatgggacaggacggccacgatcgaggcgccaaggtgattgccaccggtttcgctgacttaggattcgatgtggacattggtccgttgttccagacgccacgcgaggtggcacagcaagccgtggacgccgatgtgcatgccgtgggcgtgtcgactttggcagcagggcacaagaccctggttcccgagcttatcaaggagctaaatagccttggccggcccgacatcctggtcatgtgcgggggagttattcccccccaggactacgagtttctattcgaggtgggagtaagtaatgtgtttggaccgggtacgaggatccccaaggccgccgtccaggttcttgacgacatagaaaaatgtttggaaaaaaagcagcagagcgtg

SEQ ID NO: 8 - DNA, 2250 bp, Artificial Sequence
  Codon optimized sequence that encodes an MCM polypeptide with the I671V mutation
atgctgcgggcaaaaaatcagctgtttttgctttccccacactatctccgacaggtcaaagagagcagcggaagtaggctcatccagcagaggctgctacaccaacagcagcctttgcaccctgaatgggctgccctggcgaaaaagcaactgaagggcaaaaaccccgaggacctgatctggcatactcccgaaggcatatcgataaagcccctgtattcaaagcgagacaccatggatctccccgaagaacttcctggcgtgaaacctttcacccggggcccctaccctactatgtatacattccgcccatggaccatccggcagtatgcaggctttagcactgtggaggagtctaataagttttacaaagacaacataaaggcgggacagcaaggactctctgtcgcattcgacctggccacccatcgcgggtacgatagcgataatccaagagtgagaggggacgtcggaatggccggtgtggcaatcgataccgtagaggataccaaaatccttttcgacgggatacctctcgaaaaaatgtcagtgtccatgacgatgaatggcgctgtgataccagtgctggccaacttcatagtgaccggcgaggaacagggtgtccccaaggagaagctgactgggaccatccagaatgacattctcaaggagttcatggtaagaaatacctacatattccctcctgaacctagtatgaaaataattgccgatattttcgagtatactgctaagcatatgccgaagtttaattctattagcatttctggctaccatatgcaggaggctggagccgacgctatcttagaacttgcatacaccctggccgacggactcgaatatagtaggacagggttgcaggctggcttaactattgacgagttcgcacctagattgtcatttttttggggtataggcatgaatttctatatggaaattgccaagatgcgggcagggcgcagattatgggcccacctgattgagaagatgtttcagccaaaaaatagcaagagcctgttgttgagagctcactgccagaccagcggttggtctctcaccgagcaggacccctacaacaatatcgtgcggactgcaatcgaggccatggccgctgtgttcggtggcacacagagcctacacactaacagttttgatgaggcacttggtctccccacggtgaaatcagcccgaatcgcccgtaatacccagatcatcatccaagaggaatccggaatcccaaaggtcgcagatccctggggaggctcttatatgatggagtgtttgacgaacgacgtttacgatgctgcactcaagttaattaacgagatcgaggagatgggaggtatggctaaagccgtagctgaggggattccaaaattgaggattgaagagtgtgccgcccgacggcaggcaaggattgattccgggagcgaggtcatcgtgggcgtcaataaatatcagctggagaaagaagacgcagttgaagtacttgccattgataacaccagtgtgaggaaccggcaaattgaaaaattgaaaaagatcaagtcttcacgagaccaagccctggcggagcgatgcctggctgccctgacggaatgtgccgcatctggagacggcaatatactggcgcttgccgtggatgcatcacgggccaggtgtaccgtaggcgagattactgatgcccttaaaaaggtgttcggggagcacaaggctaacgaccggatggtgtctggcgcgtataggcaggaattcggcgagtccaaggagataacttccgctataaagagggtccataaatttatggagagagaggggagacgcccaaggttacttgtggcaaagatgggacaggatggacatgatagaggggcaaaggttatcgccacggggtttgctgacctggggttcgatgtggatatcggccccctcttccagaccccaagagaggtggcccagcaggccgtcgacgccgacgtacacgccgttggcgtgtccacgctggcggccggccacaagacactagtgcctgagcttatcaaagaattaaacagtctcgggagacctgacattcttgtgatgtgcggaggggttattccaccgcaggattacgaattcctgttcgaagttggcgttagcaatgtcttcgggcccggcaccagaattcctaaagctgccgtgcaggtccttgatgacatcgaaaaatgtctggagaagaaacagcaaagcgtg

SEQ ID NO: 9 - DNA, 2250 bp, Artificial Sequence
  Codon optimized sequence that encodes an MCM polypeptide with the I671V mutation
atgcttagagccaagaatcagttgttcctcctgagccctcactatctccgccaggttaaagagagcagtggctcacggctgatccaacagcgcctgctgcaccagcagcaacccctccaccccgaatgggcagccctcgctaaaaaacagcttaaagggaagaatcctgaagacctgatctggcacacccctgaaggcattagtataaaaccactgtattccaagcgcgacactatggacctgccagaggagctgccaggagtgaaaccttttacaagagggccgtaccccaccatgtatacttttcggccctggaccatccgccagtacgctggattcagtacagtcgaagagtctaataagttctataaagacaacataaaggctggccagcaaggactctctgtagcattcgaccttgcgactcaccgaggctatgatagcgataatcctcgcgtgaggggagatgttgggatggccggagtggcaatagataccgtcgaagacaccaaaatactcttcgatgggatccctcttgaaaaaatgtccgtgagcatgaccatgaatggtgccgttatcccggttctcgcgaactttattgtgaccggtgaagagcagggagtgcctaaggagaaactgactggcactatccagaacgacattctcaaagagttcatggtccgcaacacttacatcttcccacccgagccttccatgaaaataatcgctgacatattcgagtacactgctaaacatatgcccaagtttaactcgatcagcattagcggctaccatatgcaggaggctggcgccgacgccatcctcgagctcgcctatactttggccgacggcctggaatactcgaggacagggcttcaggccggcttaacaatcgatgaatttgccccgcgcttgagcttcttttggggaattgggatgaatttctacatggaaatcgcaaaaatgcgtgccggtagacggctatgggctcacctcattgagaagatgtttcagcctaagaacagcaagagcctgctgctgagagcccactgtcaaacgtcgggctggtcgcttacagagcaggatccctacaacaacattgtgcgaaccgccattgaggcaatggccgccgtattcggaggcacgcaatccctgcataccaactcttttgacgaggcgctgggtctgcccactgtgaaatcggccaggattgctcgcaacacacaaatcatcatccaagaagagtccgggattcccaaggttgccgatccatgggggggcagctacatgatggagtgccttactaacgatgtttatgatgctgcacttaaactgatcaacgaaatagaagagatgggggggatggcaaaggccgtcgccgaagggatacccaagctgaggatcgaggaatgcgcggctcgacggcaggcccggatcgactccggaagcgaggtcatcgtcggcgtaaataaataccaactggaaaaggaggacgcggttgaggtgttggccatagacaacacctcagtacgaaaccgacagatcgagaaattaaaaaagatcaaatcaagccgcgatcaggcactggctgagcggtgcctggccgcactgactgagtgtgcagcctcaggagacggtaacatcctcgctctggccgtggatgcaagtcgggcccgctgtacggtgggggagatcactgacgctctgaaaaaagtttttggagaacacaaggcaaacgataggatggttagcggcgcataccggcaggagttcggtgaatctaaagagattacctctgcaatcaagcgggttcacaagttcatggagcgagaaggcaggcggccacggttgttagtggctaaaatggggcaggatggtcacgacagaggggctaaggtgattgccaccggattcgccgacctagggttcgacgtggatattgggcctttgttccagacaccacgggaggtggctcaacaagccgtggacgcggatgtgcacgccgtgggggtgtccacccttgccgcaggccacaaaaccctggtgccagaactgattaaggagctcaattcattgggcagacctgacattctggtgatgtgcgggggcgtaattcctccccaggactacgagtttctgttcgaagtgggcgtgagtaacgtgttcggacccggtaccagaatccccaaggccgccgtccaggtgctggacgacatcgagaaatgtctggaaaagaagcaacagtctgta

SEQ ID NO: 10 - DNA, 2250 bp, Artificial Sequence
  Codon optimized sequence that encodes an MCM polypeptide with the I671V mutation
atgctgcgggctaagaatcaactgttcttgttgagcccccactatctgaggcaagtgaaagagagtagtggaagccggctcatccaacaaagacttctgcaccagcaacaacctctgcatccggagtgggcggcgctggcaaagaaacaattgaagggtaaaaatccagaggacctgatttggcacaccccagaggggatttcgatcaaacctctgtacagcaagagggacactatggacttgcctgaggagctgccaggagtcaagccattcacaaggggaccatatcctacaatgtacacttttaggccctggacaattagacaatacgccggtttttcaactgtcgaggaaagcaataaattctacaaggacaacatcaaagctgggcagcaaggtctttcagtggctttcgacctggcgactcacaggggttacgactctgataaccctcgagtgcgaggggatgtcggaatggccggggtggccatagatacagtggaggacaccaagattctattcgacgggataccgctcgagaagatgtcagtttctatgacaatgaacggtgcggtcattccggtcttggcaaactttattgttacaggtgaggaacagggggttccaaaggaaaaactgaccggaactatacaaaatgacatcttgaaggaattcatggtgcgcaacacctacattttcccgccagaaccaagcatgaaaattatcgccgacatattcgagtatactgctaaacacatgcctaaattcaacagcattagcatcagcggctatcacatgcaagaggccggtgcggacgccattcttgaactggcatacaccctcgccgatgggctggagtactcccgaactgggctccaggccggactaacaatcgacgagttcgccccgcgtctctctttcttctggggaatcggaatgaacttctacatggagattgcaaaaatgagagcggggcgcagactatgggcacaccttatagaaaaaatgttccagcccaaaaattctaaaagcctgctactgagagctcattgtcaaacttctggctggagtttgaccgaacaagatccatataataatattgtccggacagcgattgaggctatggccgccgtctttggcggtactcagagccttcacacaaattcttttgatgaagcactggggctgccgacagttaagagtgccaggatagccaggaacacacagattattattcaggaggagtccggcatacccaaggtggctgatccctggggcgggagctacatgatggagtgccttacgaacgatgtctatgacgccgctctgaagctgattaacgagatcgaggagatgggtggtatggccaaagctgtagccgaggggattcctaagctgagaatcgaggagtgcgcagctcggagacaggctcgcatcgactctgggtccgaagtcatagttggggtgaacaagtatcagcttgaaaaggaggatgccgtggaggtgctggccatagataatacgtcggtgagaaatagacagattgagaaattaaaaaaaattaagagtagcagggatcaagccctcgctgagcggtgcctcgcagctctcaccgaatgtgccgcaagcggcgacggtaacatcctcgctttagcagtcgacgccagcagggcccgctgtactgtgggagagatcaccgatgccctgaaaaaggtcttcggggaacataaagccaatgatcgcatggtaagcggggcttatagacaagaattcggtgagagcaaggagatcacgtccgcaatcaaaagggtccataaattcatggagagagagggtagacgcccaagactcctcgtggcaaaaatggggcaggatggacatgaccggggtgccaaagtgatcgccaccggattcgcagatctgggcttcgatgtcgacattggcccgctctttcagacacctcgtgaagtggcgcagcaggccgtcgacgctgatgtgcacgctgttggggtgagcactctcgcagccggtcacaaaaccctggtgccggaactaatcaaagaactcaactctctcgggcgtccagacatcctcgtgatgtgtggcggtgtcatcccaccccaggattacgagtttttatttgaagtgggtgtctctaatgtgttcggccccggaacacgcattcccaaagctgcagtccaggtcctagatgacatcgaaaagtgccttgagaagaagcaacagagcgtc

SEQ ID NO: 11 - DNA, 2250 bp, Artificial Sequence
  Codon optimized sequence that encodes an MCM polypeptide with the I671V mutation
atgttaagggcaaagaaccagcttttcctcctgagccctcattacctacggcaggtgaaggagagctccggaagccgcctcattcagcaacgcctcctgcatcagcagcagccccttcaccccgaatgggcggccctggctaagaagcaattgaagggtaagaacccagaggacctgatttggcatactcccgagggcatttctatcaaacccctgtacagcaagcgcgacaccatggacctaccagaagagttgccaggcgtcaaaccctttactcggggcccttatcctaccatgtacaccttccgtccctggacaatccggcagtatgctggatttagtacagtcgaggagagcaataaattttataaggacaatataaaagcaggtcagcagggcttgtccgttgcctttgacctagcgacacataggggatatgattccgacaatccccgggtgaggggtgatgtcggcatggctggagttgctattgacaccgtggaagacactaagatcctattcgatggaatccccctggagaaaatgtccgtgagcatgaccatgaacggcgctgtgattcccgtcttagcaaactttattgtgacaggcgaggagcagggcgtgccaaaagagaaattgactggtaccattcagaacgacatactgaaggagttcatggtgcggaatacatatatatttcccccagaaccgtctatgaaaatcattgcggacatcttcgagtacaccgcgaagcacatgcccaaatttaatagcatcagtatcagcgggtatcacatgcaggaggccggcgcagacgcgatccttgaactcgcgtataccttggctgatggactcgaatattcaaggaccgggttgcaagcagggctgaccatcgacgagtttgcacctcgactgagctttttctgggggatcgggatgaacttttatatggagatcgccaagatgcgtgcggggcgacgcttatgggcgcatcttattgaaaaaatgtttcaacctaaaaacagcaagtcgctgctcctccgggcgcactgccagactagcgggtggagcctgaccgaacaagatccctacaataacatagttaggaccgcaatagaagccatggcagcggtgtttggcgggacgcagagtctccacaccaacagcttcgatgaggccctgggacttcccacagtgaagtctgccaggatcgcccgcaacacccagattatcatacaagaagagtctggaatcccaaaggtggccgatccctggggagggtcttatatgatggagtgtctgactaacgacgtgtacgacgcggccctgaaactaatcaatgagatcgaggagatggggggcatggctaaagcagtggccgaagggataccgaagctaagaattgaggaatgtgctgcaaggagacaggcgcgaatcgattccggctccgaggtgatcgtgggtgtcaataagtatcagctggagaaggaggatgctgtcgaggtcctggcgatcgataacacatcagtcaggaatagacagattgagaaacttaaaaagattaagagctcccgggatcaggctcttgccgagcgctgccttgctgctcttacagaatgtgcagcaagtggggacggtaacatactggcgctggcggtcgatgcctcaagggcaagatgtaccgtcggtgagatcaccgacgcgctgaagaaagttttcggcgaacacaaggccaacgaccgaatggttagcggtgcttatagacaggaattcggcgagtccaaggaaataacatccgctatcaagagagttcataaattcatggagcgagaggggcgtagaccccgcctcctggtcgctaagatggggcaggacggtcacgacagaggggcaaaggtcattgccacaggatttgcagacttagggtttgacgtcgacataggacctttatttcaaaccccaagagaggtggctcagcaagcagtggacgccgatgttcatgccgtaggagtgagtaccctggcagccggccacaagaccctagtgccagaactgattaaagaactcaacagtttaggaaggccagatatcctggtgatgtgcggcggcgtaatccctccacaagactatgaattccttttcgaagttggcgtttccaatgtatttggccctggcacaagaatacccaaggccgcagtgcaggtgctcgacgacatcgaaaaatgcctggagaagaagcagcaatcagtt

SEQ ID NO: 12 - DNA, 2250 bp, Artificial Sequence
  Codon optimized sequence that encodes an MCM polypeptide with the I671V mutation
atgctgcgcgcaaaaaaccagttatttctgctttctccccattacctgagacaggtgaaagaatcaagcggctctcgactgatccagcaacggctcttacatcagcagcagccgttgcatcctgagtgggcagcactggccaaaaagcagctgaagggcaaaaatcccgaggacctaatctggcatacccccgagggaatcagtattaagcctctttattctaaacgggacaccatggacctcccagaagaactgcctggagtaaaacctttcacccgaggcccttatcctacaatgtacacgtttagaccatggaccatcagacagtacgctgggttctcaacagtggaggaatccaataagttctataaagacaacatcaaagcaggccaacagggactgagcgttgcctttgatctggcaacccaccgcggttacgatagcgacaaccccagggtaagaggcgacgtcggaatggcaggggtagcgatagacactgttgaggacaccaaaattctgttcgatggtatccctctggaaaagatgagcgtgtccatgactatgaatggagcagtgatccctgtgctggcaaactttatcgttaccggcgaggagcagggcgtgccaaaggaaaaactgacggggactattcaaaacgatatcttaaaggagtttatggtgcgcaacacgtatatatttccaccagaacctagcatgaaaatcatcgctgatatattcgagtacacagcaaaacatatgcccaaatttaactccattagcatatccggataccacatgcaggaagccggagcggacgcaatcctcgagctagcgtatactctcgcggacgggctcgagtatagcagaactgggttgcaagctggcctgaccatcgatgaatttgcacccagactctcttttttttgggggataggcatgaatttttatatggaaatcgcaaaaatgagagccggccggagattgtgggcccacttgatcgagaagatgttccagccaaaaaacagcaaatcactgttgcttcgagctcattgtcagacatcgggatggtctctgaccgaacaggatccctacaacaacattgtgagaaccgccatcgaggccatggctgcagtcttcggaggaacacaaagtctccatactaactcattcgatgaggctctgggactgccaactgtaaaatctgccagaattgctagaaacacccagattattattcaggaggagtccggtatacctaaggttgcagatccgtgggggggcagttacatgatggagtgtctgaccaacgacgtgtatgatgccgcactgaagctcattaatgagatcgaggagatgggtggcatggccaaagctgtggcggaaggaatccccaaactgcgaattgaggaatgcgcagctagacgtcaggcacggatcgacagcggatccgaggtgattgtgggggttaacaaatatcagctcgaaaaggaggatgcagttgaagtgctcgcaatcgataatacgtcggtgcgcaataggcagattgagaagctcaaaaagattaagagctcaagggatcaggctctggctgaaagatgtctcgctgccctgacagagtgcgcagcaagtggagacggcaacatccttgcgttggcagtcgatgcttcaagagctcgctgtaccgtcggggagatcacagacgctctaaagaaagtttttggggaacacaaggctaacgatcgaatggtgtccggtgcatatcgccaagaatttggtgagagcaaggagatcaccagcgcgattaagcgggtccataaatttatggagagagaggggcgtagaccgcggttactggttgctaagatggggcaagacggccacgatagaggcgccaaagtgatcgccaccgggttcgcagacctcggatttgacgttgacattggtccactttttcagaccccacgcgaggtggcacagcaggcagtcgacgccgacgtacacgcagtgggcgtatcaactctggctgctgggcacaaaacccttgtgccggagctcatcaaagagctgaactcgctcgggcgccccgatattctcgttatgtgtgggggggtcattcctccccaggactacgagttcctcttcgaggtcggggtatcaaatgtgtttggacccggaacacgaatacccaaggcagccgttcaggtgctggatgatattgagaagtgcttagaaaagaaacagcagtcagtg

SEQ ID NO: 13 - DNA, 2250 bp, Artificial Sequence
  Codon optimized sequence that encodes an MCM polypeptide with the I671V mutation
atgctcagggcaaagaaccagttatttctgttgtcaccccattacctcaggcaggtgaaggaatctagcgggagccgcctgatacagcagcgtcttttgcaccagcaacagcctttacatccagagtgggcagctctggcgaagaaacaacttaaggggaagaatcccgaggacttgatttggcacactcccgaaggtattagcattaaaccgctatactccaaaagagatacaatggacctgcccgaagagcttcccggagtgaagccatttacacgcggcccatatccaaccatgtatacctttcgaccttggaccataagacaatatgccgggttttctaccgtggaggaatcaaacaaattctataaggataacatcaaggccgggcagcagggcctcagcgttgcctttgacctggccactcacagaggctatgattccgacaatccccgagtgagaggggatgttgggatggccggagtcgccatagatacagttgaagatacgaagattctcttcgatggaatccccctcgagaaaatgagtgtaagcatgaccatgaacggggcagtgatacccgtgctcgccaattttatcgtgactggcgaagaacaaggggtgcccaaagaaaagctcacaggcaccattcagaacgacatactgaaggagttcatggtgcgtaacacttacattttcccccccgaaccttcaatgaagattatagccgatatattcgaatacacagccaaacacatgcccaagttcaacagcattagtattagtgggtaccatatgcaagaagccggtgccgatgctatactggagcttgcgtacacactcgcagacgggctagagtatagccgtaccggcctccaggccggtctaactattgacgagttcgcaccccgtcttagttttttctggggaattggtatgaatttctatatggagatcgcaaagatgagagctggtcggagactctgggcccacttaattgagaaaatgtttcagcctaagaattccaagtccttgctgctccgggctcattgtcaaactagcggttggtctttaactgagcaagacccctataataacattgttcgcactgctattgaggctatggcggcggtgttcggcgggactcagagcctgcacacaaacagctttgatgaagctcttggacttccaaccgtcaagtccgccagaatagcccgaaacactcagattatcatccaggaggagtcaggaattcctaaggtcgctgatccatggggcgggtcttacatgatggagtgcctcaccaatgacgtctacgatgccgccctcaaactgataaacgaaatagaggagatgggagggatggccaaggcagtagcggaaggtatcccaaagctccggatcgaggagtgtgcggcgcgccggcaagctcggatcgattccggaagcgaggtgatcgtcggggtgaacaagtatcagctagaaaaggaagatgctgtggaggttctcgcaatagataacacatcagtacgaaacagacagatcgagaaactgaagaagatcaaatcatcaagagatcaggccttggctgagagatgcttggctgcattgacagagtgcgccgcaagcggggatggcaatatccttgcattggctgtcgacgcttcccgtgccaggtgcacagtaggtgaaattaccgacgctttgaaaaaggtgttcggagagcacaaggccaatgatcgcatggtttccggcgcctaccgacaggagttcggcgaatcaaaagagatcacatccgcaatcaagagggtgcacaaatttatggaacgcgaggggagacggccgcgcctccttgttgcgaagatgggacaggatggacacgacaggggagctaaggtcatagccacggggttcgcagacctaggtttcgacgtggatatcggaccgctattccagacacctcgggaagtagctcaacaggccgttgacgccgacgtacacgccgtgggcgtctctaccctggcggctggtcataaaacactggtgcctgagttgatcaaggagctcaactccctggggcgtccagacatattagtgatgtgcgggggagtcattccaccacaggattatgagtttttatttgaggtgggcgtatctaatgtgtttggccccggtacacgcatcccaaaggcagccgtgcaggttctggacgacatcgagaagtgtctcgagaagaagcagcagtctgtg

SEQ ID NO: 14 - DNA, 2250 bp, Artificial Sequence
  Codon optimized sequence that encodes an MCM polypeptide with the I671V mutation
atgctgagagcgaaaaaccagctattcctgttatcaccacactacctgagacaggtaaaggagtcgtcagggagccggcttattcaacaacgactgctccatcaacagcagccactacacccagaatgggccgcactggctaaaaaacaactgaagggcaagaaccctgaggatctgatctggcacacgcctgaaggaatctcaatcaaacctctgtacagcaagcgcgacacaatggatctgccagaggagctgcctggagttaaacccttcaccaggggcccttacccaactatgtacacttttagaccttggacgattaggcagtatgctggattctcaacagttgaggagtcaaataaattttacaaggacaacatcaaggccggacagcagggactctctgtcgcctttgacctagccacacatagagggtacgactcagataatccccgggtccgtggcgacgttggaatggcaggagtggctattgataccgtggaggataccaagatactctttgacggcattcccctggagaagatgagcgtgtctatgacaatgaacggggcagtgatacccgtgctagcgaatttcattgtgacgggcgaggagcagggcgtgcctaaggaaaaattgaccggtactattcagaacgacattctgaaagagttcatggtgcgcaacacatatatctttcctccagaaccatccatgaaaataatcgccgacatattcgaatacactgccaagcacatgcccaaatttaactctatatctatttctggttaccatatgcaagaagctggagcagacgctatccttgaattggcctacaccctggccgatgggcttgagtactcccgaactggattgcaggcgggacttacaatcgacgaattcgccccccggctcagttttttctggggtataggaatgaatttctatatggagatcgcgaaaatgcgggctgggcggagactctgggcccacttgatcgagaagatgtttcagcccaagaacagcaaatccctgctcctgagggcccactgccagacaagcggctggagcctcacagagcaggatccctataataacattgtgaggaccgctattgaggccatggctgcggtctttggagggacccaatctttacacactaattcctttgacgaggccttagggctgcctacggttaagagtgctcgcattgctaggaacacccaaatcattattcaggaggagtcaggcatcccgaaggtggcagacccttggggggggtcatacatgatggagtgtctgacaaacgacgtttatgacgccgctctgaagctgattaatgagatagaagagatgggcgggatggcaaaggcagtcgcagaaggaattccaaaactgcgcattgaggaatgtgcagcccgcagacaagcccgaatagacagcggaagtgaagtcattgtaggagtgaataaataccaactggagaaagaggacgctgttgaggtgcttgctattgataacacaagcgtccgcaatcgacagatcgagaagcttaaaaaaattaagtcgagccgagatcaggccctggccgagcgctgccttgccgcgctgacggagtgcgccgcctcaggagacgggaatattcttgctctggcagtggacgctagccgcgcacgatgcacagtcggtgagattactgatgctctcaaaaaagtgttcggggagcacaaggctaatgataggatggtttccggagcctacagacaagagtttggtgagtcaaaggagatcacgagtgccattaaacgcgtccacaaatttatggagagagagggtcgccggccaaggctgctggtggctaagatgggacaggacggccacgataggggggctaaagtgatcgccacaggatttgccgaccttggctttgatgtcgacatcggaccactgttccagacaccaagggaggtcgcgcaacaggcagtagacgcagatgtccatgccgtcggggtcagcacgctggcggctggacataagactctggtccccgagcttatcaaagagctgaattcactcgggaggccagatatcctcgtgatgtgtggtggtgtaattcctccccaggattacgagtttttgttcgaggtgggggtctcaaatgttttcggccctggcacacgtatccccaaggccgcagtgcaggtcctcgatgatatagagaagtgcctggaaaagaagcagcaaagcgtc

SEQ ID NO: 15 - DNA, 2250 bp, Artificial Sequence
  Codon optimized sequence that encodes an MCM polypeptide with the I671V mutation
atgcttagagccaagaatcagttgttcctgttaagcccacattacctcagacaggtgaaggagagttccggctcacgcctcattcagcagcgtttactacaccagcagcagccgctccaccctgagtgggcagctttggccaagaaacagttgaagggtaaaaatcccgaagatctcatctggcacactcccgaaggaatctcaattaaacctctgtacagtaaaagagacacaatggaccttccggaggaactcccaggcgtcaagccatttaccaggggcccatatccaaccatgtataccttccgtccttggacaataagacagtacgccggctttagtactgtggaggaatctaataagttttacaaagataatatcaaagctggccagcaggggcttagtgttgcgttcgacctggccacccatcggggctacgactctgacaaccctcgggttcgcggcgatgtgggaatggcaggtgtcgccattgataccgttgaggataccaagattctgttcgacggcatccccttggaaaagatgagcgtaagtatgaccatgaatggtgctgtcattccagtgttggctaatttcattgtaaccggagaagagcagggagtgccaaaagagaagctgacaggcacaatacagaacgacattctgaaggagttcatggtgcggaatacctatatcttccccccggagcctagtatgaagatcatcgccgatatttttgagtatacagcaaaacacatgccaaaatttaactctatttctatttcaggataccatatgcaggaggccggagccgacgccattcttgagctggcttatactctggctgacggcttggagtactctaggactggcctgcaggccggcctcacaatcgacgaattcgcaccccgactgtcctttttttgggggattggcatgaatttttacatggagatcgcaaaaatgcgggcgggccgcagactgtgggcccacctgattgagaagatgtttcagcccaagaatagcaagtcacttcttctcagggctcattgtcagacttcaggttggtcgctgaccgagcaggatccctacaacaacattgtacgaactgccatcgaggccatggccgctgtgtttggaggcacccagtcactgcatacaaatagttttgatgaggctctggggctccccaccgtgaaaagcgctcgaatagcccggaacacgcaaatcatcatccaggaggaatccggaatacctaaagttgccgacccatggggtgggagctacatgatggaatgtctaaccaacgatgtgtacgatgcagcattgaagcttataaatgagatcgaagaaatggggggaatggcaaaagcagtggccgaaggcattcctaaacttcgcatcgaagagtgcgctgcacggaggcaggcccgaatcgattccggtagcgaggtgattgtgggagtgaataaatatcaactggaaaaggaagatgccgtggaggtgctggctattgataacacctcagtaagaaacaggcagattgaaaaattgaaaaagataaagtcatcgcgcgatcaagccctggccgaacggtgtctcgcggccctgactgagtgcgccgccagtggtgatggaaacatcttggcactggctgtcgatgctagccgggcccgctgcaccgtgggagaaatcactgacgccctgaagaaggttttcggcgaacataaggcaaatgacagaatggtttcaggggcctataggcaggaatttggcgaatccaaagaaattactagcgccatcaagcgagtgcacaagttcatggagcgggaaggtcgtcgcccgcgcctgcttgtcgcaaaaatgggccaggacgggcatgacagaggggctaaagtcatcgccactggatttgcggatctcggtttcgacgtggatattggacctctgttccagacaccacgggaggtggcccagcaggcggtggatgcagatgtgcacgcagtcggggtctcgacactcgccgcaggacacaaaaccttagtccctgagctgattaaagaacttaactcattaggccgccctgatatcctggttatgtgcggaggcgtgatccctccacaggattatgaatttttattcgaagttggggtgtctaatgtttttggccccgggacacggatcccaaaggccgcggtgcaggtcctggatgatatcgagaaatgtttggagaagaagcagcaaagtgtg

SEQ ID NO: 16 - DNA, 2250 bp, Artificial Sequence
  Codon optimized sequence that encodes an MCM polypeptide with the I671V mutation
atgctgagagcgaaaaaccagctttttcttttgtcacctcattacctgaggcaggtcaaagagagttcgggttccagactgatacagcagcgccttcttcatcagcagcagcccctacatccagagtgggcagctctcgctaagaaacagctgaagggcaagaaccccgaagatctcatctggcacactcctgagggcatttctattaagcccctgtactctaaacgagacactatggatctccccgaggaattgccaggcgtgaaaccattcacaaggggcccataccccaccatgtatactttccggccatggacaatccggcagtacgccggcttctcgaccgtggaagaatccaataaattttataaggataacataaaggcggggcagcagggactatccgtggccttcgatctagctactcacagaggctacgacagcgacaacccaagagttagaggggatgttggcatggccggggtggcaatcgacaccgtggaggatacgaagatcctcttcgatggaatccccctggagaagatgagtgtgtcgatgaccatgaatggcgccgtgatccccgttctggctaatttcatagtgacgggcgaagaacagggggtgccaaaggaaaaactgactggaaccattcagaacgacattttaaaggagttcatggtgaggaatacttacatctttccaccagagcctagtatgaaaataatagctgacatttttgagtacaccgctaagcatatgcctaagtttaattcaatctctatttcaggttatcacatgcaagaggcgggtgcagatgcaatcctagagctggcctatacactggctgacggactggagtactctcgcacgggacttcaggccggactcactatcgacgaatttgctcctcggctgagttttttctgggggatcgggatgaatttttacatggagatcgcgaaaatgcgtgctggcaggcgcctgtgggcgcacttgattgagaaaatgtttcagcccaaaaattccaagtccctgctgctgagggctcattgccaaactagcggatggtctcttaccgagcaagatccctacaacaatattgtgagaacagctattgaggccatggctgcagtgtttggagggacacagagtctccacaccaactcatttgatgaagcccttggattacccactgtgaagtctgccaggatcgcaaggaatactcagataatcattcaggaggagagcggcatcccaaaggtagctgacccctgggggggctcctacatgatggagtgtttgaccaacgatgtgtacgacgccgcgctcaaactcattaatgaaattgaggaaatgggtgggatggctaaagccgtggccgagggcattcctaagctcagaatagaagaatgcgccgccagaaggcaggcgcgcattgatagtggttcagaggttattgtgggagtaaataagtaccagctggagaaggaagacgccgttgaagttctggccatcgataacacaagtgtgcgcaacagacagatcgaaaaacttaaaaagattaagtcgagtcgggaccaggcattggcagagagatgtttagccgcacttaccgaatgtgccgcttcaggcgacgggaacatcctcgctctggccgtagatgcatcccgtgcgcgctgcactgtcggcgaaatcaccgacgccctgaagaaagtgtttggggagcacaaggcaaatgatcggatggtttctggggcttacaggcaggaattcggagaaagtaaggagatcacctccgccataaagcgtgtccacaagttcatggaacgggaaggccgccgaccaagactactcgttgccaagatgggccaggacggacatgacagaggtgccaaggtgatagcaacagggtttgccgacctgggattcgacgtggatatcggacccctctttcaaaccccacgggaagttgcccaacaggccgtcgatgctgacgtgcacgctgttggagtgtctactcttgctgccgggcacaagacccttgtgcccgagctgattaaggagttgaactcccttggacggcctgacatcctggtgatgtgcgggggcgtgatccctcctcaggactatgaattcctgtttgaggtgggggtatcaaacgtttttggtccgggcactaggatcccaaaggccgcagtacaggtattggacgacatagagaagtgcctcgaaaagaaacaacaatcagta

SEQ ID NO: 17 - DNA, 2250 bp, Artificial Sequence
  Codon optimized sequence that encodes an MCM polypeptide with the I671V mutation
atgttgcgcgccaaaaatcagctttttttactatcacctcactacctgagacaggtgaaagagtcctccgggagccggctcattcaacaaaggctactacatcaacaacagcccctccaccctgaatgggcagctctcgcaaagaaacagctcaagggtaaaaatcctgaggacttaatctggcatacacctgaaggtatttctataaagcccctgtattccaagcgcgatacaatggatctgccagaagagctccctggagtgaaaccttttacccggggtccgtatcctactatgtatacttttcgcccttggacgataaggcaatacgctggattctcaactgtggaagaaagtaataaattttacaaggataacattaaggccggccagcagggtcttagtgtggctttcgatcttgccacacaccggggttacgattcagacaatccacgggtgcgtggcgatgtgggcatggcgggggtcgccatcgataccgtggaggataccaagatactcttcgatggcattccattagagaaaatgagtgtatctatgacgatgaacggcgccgtcatccccgtcttagccaattttattgtcacaggcgaggagcaaggagtgcctaaagagaagctgacaggaacaattcaaaatgacatactgaaagagtttatggtcaggaacacatacatattccccccagaaccgtctatgaagattatagcggatatttttgagtacactgcaaagcatatgccgaaattcaactctatctcgatctccggctaccacatgcaggaggctggcgccgacgccatccttgagctggcctacaccctcgcagacgggctggagtattcccgcactggcctccaagccggcttgacgatcgacgaattcgcacccagactgtcatttttctgggggatcggcatgaacttttatatggagatcgcaaaaatgcgcgccggacggaggctttgggcacacctcatagaaaagatgtttcagcctaaaaattccaaatctctgctgctcagagcccactgtcagacgagcggatggtccctgaccgagcaggatccgtacaacaatattgtgagaaccgccatcgaggctatggctgctgtgtttgggggcactcaaagtctccatacaaatagcttcgacgaagctctggggcttcctacagtgaaatccgccagaatcgccagaaatacccagattattatccaggaggaaagtggcattccgaaggttgcagacccatggggtggctcctatatgatggagtgtctgacaaatgatgtctatgacgctgcccttaagctgatcaatgaaatcgaggaaatgggcgggatggcgaaagctgtggctgagggcatcccaaagttgagaatagaagaatgtgcggccaggcggcaggctcgcatcgactctggtagtgaggtgatcgtgggcgttaacaagtaccagctggaaaaggaagatgctgtggaggtcctggccatcgacaatacctccgtgaggaatagacagatcgaaaagctcaagaagatcaagtcctcccgggaccaagctttggcggagcgttgtctggctgccctcactgaatgtgcggcatcaggggacggtaatattctggcgctcgctgtggacgcaagtagggccaggtgcactgtgggggaaattaccgatgccctcaagaaggtttttggcgaacacaaggccaatgaccgcatggtgtcaggggcataccgccaggagttcggcgagagcaaggagatcacgagtgcaatcaagcgcgtccacaagttcatggaacgtgaggggcgcagacccagattactcgtcgcgaaaatgggtcaggatggccatgaccgcggcgcgaaagtgatagctactggatttgcagatctggggttcgatgtcgacattggccccctttttcagacccctagggaggtcgcccagcaggccgttgacgcggacgtccacgccgttggcgtttcaacgctggctgccgggcataagaccctggtgcccgagcttattaaagagctgaatagcctgggcaggcctgacatcctcgttatgtgcggcggggtcatccccccgcaagactacgagttcctgttcgaggttggcgtctcaaacgtgttcggcccagggacacgcatccctaaagcagcagttcaggtgctggatgacattgagaagtgtcttgagaaaaaacagcagtctgtg

SEQ ID NO: 18 - DNA, 2250 bp, Artificial Sequence
  Codon optimized sequence that encodes an MCM polypeptide with the I671V mutation
atgctgagagcgaaaaatcaactcttcctattgtctcctcattatctccgccaggttaaggagtcttccggaagccgtttgatccagcagcggctactgcatcagcagcagcccttgcacccggagtgggcggctctcgccaaaaaacagcttaaaggtaaaaatccagaggatctcatctggcacacaccagaaggcatcagcattaagcccctgtactcaaagagggataccatggatctcccggaggagcttccaggggtgaagcctttcaccagggggccgtaccccactatgtacacctttagaccatggacgattcgtcagtatgcgggctttagcaccgtggaagagagtaacaagttttataaggacaacatcaaagccggacaacagggtctgtctgttgctttcgaccttgccacacaccggggctatgattctgacaacccacgtgtgcgtggcgacgtgggtatggcaggcgttgccatcgacactgtcgaggacaccaaaattctattcgatggaatccccctcgaaaagatgtccgtttctatgacgatgaacggagccgtgatacccgtgctggccaattttattgttacaggcgaggaacaaggtgtcccgaaggaaaagctgactggaacgattcaaaatgatatactcaaggagtttatggtacgaaacacttatatttttccacccgagccctctatgaaaatcatcgcagacatattcgagtacacggccaagcatatgcccaaatttaacagcatctcaattagcggataccacatgcaagaggcgggcgcagacgcgattctggagctggcctacacattagctgatggcctcgagtactcccgcaccggcctgcaggccggactgactatagacgaatttgcgcctaggctctcctttttctgggggattggaatgaatttctacatggagatagcaaagatgcgcgctgggcgccgtttatgggctcatctaattgaaaaaatgttccagcccaaaaatagtaaatccttactgctgcgggcccactgccagacttctgggtggtcactgaccgagcaggacccctacaataacattgtcaggaccgccattgaagcaatggctgctgtttttggggggacccagtccttgcatacaaacagttttgatgaagccctgggactgccaactgttaaaagcgccagaattgcccgtaacacccagataatcatccaggaggagtccggtattccaaaagtggccgacccctgggggggtagctatatgatggagtgtctgaccaacgacgtctatgacgccgcacttaagctaattaacgagattgaggaaatgggtggaatggccaaagccgtagctgaaggtatcccaaagctgcgcattgaggaatgcgccgctagacggcaggcgcgaatcgactctggtagtgaggtcatcgtcggggtgaataagtaccagttggagaaggaggatgcagtagaggtactggctatagacaacacaagtgtccgcaaccgacagatcgagaagctcaaaaagataaagagctcaagggatcaggccctcgccgagcgctgtctcgccgctcttaccgagtgtgctgccagtggtgacggaaacatattggccctcgccgtggacgcttcaagggcacggtgtacagtgggtgagattactgatgcactgaagaaggtattcggagaacacaaggctaacgatagaatggtatccggggcctatcggcaggagttcggagagtcaaaggagattactagcgcaatcaagagagtgcataaattcatggagcgcgagggtagaagaccacgacttctggtcgctaaaatgggccaagacggtcatgatcgcggtgcgaaggtcattgctacaggtttcgccgacttgggctttgacgtcgacataggcccactcttccagaccccccgcgaagtagcccagcaggccgtggacgccgatgttcacgccgttggagtgtcaacgttagccgctggccacaagacgctagtgcccgagttgattaaggaactcaactcactgggccgacccgacattctcgttatgtgcggaggggtgattccaccacaagattatgagttcctgtttgaggtcggagtctccaatgtatttgggcctggaacgaggatacccaaggccgctgttcaggtgctcgacgatatcgaaaagtgcctggagaaaaagcagcaatctgtg

SEQ ID NO: 19 - DNA, 2250 bp, Artificial Sequence
  Codon optimized sequence that encodes an MCM polypeptide with the I671V mutation
atgctcagagcaaagaaccagctgttcctattatcccctcactacctgcggcaggtcaaggagagttcagggagtcgccttatccagcagaggctgttacaccagcagcagccacttcatcctgagtgggctgccctggctaagaaacaactgaaagggaagaaccccgaggacctgatctggcatacacctgagggcatctccatcaaacctctgtactctaaacgagacaccatggacctgccggaagagttgccaggagtgaaaccctttacacgagggccttatccaaccatgtatacctttaggccttggaccataagacagtacgccgggttttcaaccgtggaggagtctaataagttttacaaggacaatatcaaggctggccagcagggcctgagtgtcgcgtttgatctggccacacatcggggctatgatagtgacaacccaagggttcgtggcgacgtgggtatggccggtgtggctatagacacagtggaggacactaagatcctgtttgacgggattcctcttgagaagatgtccgtcagcatgaccatgaatggcgccgtgattcctgttttggcaaacttcattgtcactggggaggaacagggcgttcccaaggaaaagctgacagggactatccagaatgatatactgaaagagttcatggttcggaatacatacatattccctcctgaaccttccatgaagatcatcgctgacattttcgaatatacagcaaagcacatgccaaaatttaacagcatttcgatttcaggctatcacatgcaggaggctggcgctgatgccatcctcgaattagcgtacactctagctgatgggctggagtactcaaggacaggcctccaggccggcctgacgattgatgagttcgctcctcgcctctcttttttctggggcatcggtatgaacttttatatggagatcgcgaagatgcgggccggccgcaggctttgggctcatctgattgaaaagatgtttcagccaaagaatagcaaatcactgctgttacgcgcccattgtcagacaagcggctggagcctgaccgagcaggatccttataacaatatcgtacggacagccattgaagcaatggccgcagtcttcggcggaacccagagcctgcatactaatagcttcgatgaggctcttggtctcccaaccgtcaagtccgcccggatcgccaggaacacccagatcattattcaggaggagagtggtatccctaaagtggctgacccttggggcgggagctacatgatggaatgcctcaccaacgacgtttacgacgcagccttgaaactgatcaacgagatcgaagagatgggcgggatggccaaggccgtagccgaaggaatacccaaactccgaatcgaagaatgcgcggctaggcggcaggcacggattgactcaggcagcgaggtgatagttggggttaacaagtaccagctagagaaggaggacgctgtagaagttctggcaatcgacaacaccagtgtgagaaatcgtcaaatagaaaaattgaagaagataaagtcatcccgggaccaagccctggccgagagatgtctcgccgcattgactgagtgtgccgcgtccggcgacggcaacattctagctctggctgtcgacgcctctcgagccaggtgtacagtgggcgaaatcaccgacgctttgaagaaagtcttcggggagcataaggctaacgataggatggtgtctggagcttatcgccaggaattcggggagtctaaagagatcacttctgcaattaagcgggttcacaaattcatggagagagagggcaggcggccacgattattggtagccaagatgggccaggatggacacgataggggcgccaaagtgattgctacgggcttcgccgatctgggatttgacgtggacattgggcctttgttccagacccctcgagaagtcgcccagcaggccgtcgacgcagatgttcacgccgtgggtgtgtccacgctagccgcaggacacaagacattggtgccagagcttatcaaagagctgaactccttgggcaggcccgacatattggtcatgtgtggcggcgtaatcccacctcaggattatgaattcctatttgaggttggggtctcaaacgtgttcgggccagggactaggatcccgaaggccgcagtccaggttctggatgacattgaaaaatgtctggagaagaagcaacagagtgtg

SEQ ID NO: 20 - DNA, 2250 bp, Artificial Sequence
  Codon optimized sequence that encodes an MCM polypeptide with the I671V mutation
atgcttagggccaagaaccagctgtttctgctcagccctcactatttacggcaggtcaaggagagctcaggatccaggctgattcagcagcgtttgctgcaccagcagcagcccctccacccggagtgggccgcactcgctaagaaacagctgaaagggaagaatcctgaggacttgatctggcacacaccagagggaatcagtatcaagcctctgtacagtaagcgggacacaatggacctacctgaagaactccccggagtgaagccgttcaccagaggaccttacccaaccatgtatactttcagaccgtggacaattagacagtatgctggattttccactgttgaggaatcaaacaagttttataaggataacatcaaagcgggtcaacaggggctgtctgtggcattcgatttagcaacccacaggggctacgactcagataatccacgagtgagaggtgatgtgggcatggcaggcgtggctattgatacagtggaggacacaaagatactctttgatggaatccctctggagaagatgtccgttagcatgactatgaacggtgccgttattcccgtgctagcaaacttcatcgtgactggggaagaacagggggttccaaaggagaaattaaccgggaccatacagaacgacattctcaaggagtttatggtgcgtaacacttacattttcccgcctgaaccaagcatgaagatcatcgccgatattttcgagtatacagccaagcacatgccgaagttcaacagtatctctatctctggataccatatgcaggaggctggtgcagacgccattctagaactagcgtatacactggccgatggattggaatacagcagaacaggcctgcaggccggactgactattgacgagttcgcccctcggctttcctttttctggggcatcgggatgaacttctatatggaaatcgccaaaatgagggcaggccggcgactgtgggctcatctgatcgagaagatgtttcagccaaaaaacagcaaatctttgcttcttagggcccactgccagacttcagggtggagcctcactgagcaagacccatacaacaacatcgtcagaactgcaatcgaggccatggctgccgtattcggtggcacacagtctttgcacactaactcattcgatgaggcgctcggcctgccaactgtgaagtctgccaggattgctcgaaatacgcagattatcattcaggaggagagcgggatccccaaggtggccgacccatggggtgggagttatatgatggagtgtctgacaaatgacgtgtatgatgcggcccttaagctcattaacgagatagaggaaatgggcggtatggccaaggccgtcgctgagggtattcctaagctaaggatcgaagagtgcgctgctcgcaggcaggccagaattgatagcgggtctgaagtgatagtgggcgtgaacaagtatcagctcgagaaggaagacgctgtagaggtgctagccattgataacacctccgtgcgaaataggcagatcgagaaattgaagaagattaagtcttcacgggaccaggcacttgcagagcgatgtttagcggcactgaccgaatgcgctgctagtggtgacggtaatattctagctttggcagttgatgcgtctagagctaggtgtactgtgggcgaaataactgacgctctcaaaaaagtgttcggagagcacaaggctaacgaccggatggtgtccggagcctatcgacaagagttcggggagtctaaagaaattacaagcgccataaagagagtccacaagtttatggaacgagagggtcgtcgcccgcgactgcttgtggccaaaatgggtcaggacggacatgaccgaggagccaaagtaatagcgacaggcttcgcagatctcggctttgatgtggacattgggcctctttttcagacccctcgcgaggtagcccagcaagccgtggacgctgatgtgcatgcagtcggagtctccacgctggcagccggccacaaaaccttagtgcccgaattaattaaggagctgaacagtttggggaggccagatattttggtcatgtgcggaggcgtaattcctccgcaagattatgaatttttgtttgaggtaggcgtcagtaacgtgttcggacccggaacacgcattccaaaagcagcagtgcaggtcctcgatgatatcgagaagtgcctcgagaaaaagcagcaatcggtg

SEQ ID NO: 21 - DNA, 2250 bp, Artificial Sequence
  Codon optimized sequence that encodes an MCM polypeptide with the I671V mutation
atgttacgcgcgaaaaatcaattatttctactgtcaccccattatcttcgccaggtgaaggaaagctccgggtcaagactgatccagcaaaggctcctgcaccagcagcagcccctccaccccgaatgggctgcccttgccaagaaacagttgaagggcaaaaacccggaggacttgatatggcacacaccagaagggatcagcattaagccactgtactccaagcgagacaccatggacctgcctgaggaactgcccggcgtgaaaccttttacacgtgggccctaccctacaatgtacacatttcgcccctggacaataagacagtacgccgggttctcaaccgtggaggagtctaacaaattctataaggacaatataaaggcaggacagcaagggctctctgtggcattcgatctggcaacacatcgtgggtatgactccgacaacccacgtgtgcggggggacgtgggtatggccggagtcgcaatcgatacagtcgaggatacaaagatcctcttcgatggcattccactggaaaagatgagcgtgagtatgacaatgaacggggcagtcattcctgtgctggccaatttcattgtgacaggggaagagcaaggtgtccccaaggagaaactgactggtacgatccagaacgatatcctgaaggagtttatggtgcggaatacttacatcttcccccccgaaccatcaatgaagatcatcgccgacattttcgagtataccgccaagcacatgcccaagtttaactcaattagcattagcgggtatcatatgcaggaggccggagctgatgccattttggagctggcatatactctggccgacggtctggagtattcaagaacaggcctgcaggccggtctgaccattgatgagtttgctccccgccttagctttttttggggaattggaatgaatttctacatggaaattgctaagatgagggccggcagaaggctctgggcacacctcatcgaaaagatgtttcagccaaagaattcgaagtcactcttgttaagggcgcattgtcagacgtctggctggtctctaaccgaacaagacccctataacaacatagtcagaacagccatcgaagcaatggctgctgtcttcgggggcacccagagcctgcataccaatagtttcgatgaagcccttggactgcctaccgtgaagagcgcacgaattgccaggaatacacagattataatccaggaggaatccggcattcccaaggtcgccgatccttggggcgggagctatatgatggagtgtctcactaatgacgtgtatgacgcagctctgaagctgatcaacgagatcgaagagatgggcggcatggcgaaagccgtggctgaagggatccccaaattacgaatcgaggagtgtgccgctcgccggcaggcccgaatagatagcggatctgaagtcatcgtgggagtaaacaaataccagctggaaaaggaagatgccgtcgaggtgttagcgatagacaacacttcggtaaggaacaggcaaattgaaaaattgaaaaaaattaagagcagccgcgaccaggcattggctgagagatgtctcgccgccttgacagaatgcgctgcctcgggtgacggaaacatcctcgcgctggcggtggacgcctctcgagcgcgctgtactgtgggcgagataactgacgccctgaagaaagtgttcggcgagcacaaagctaacgaccggatggtctcgggagcctaccgtcaggagttcggcgagagtaaggaaataacaagtgccattaagcgagttcacaaatttatggagagggagggacggcggccccggctcctggtcgctaaaatgggacaggatggacacgaccgaggagcaaaagtgattgctactgggtttgctgatctaggatttgatgtggatatcggccccctgttccagactccccgcgaggtggcgcaacaagctgtggatgccgacgtccacgcggtgggcgtgtcaactctggctgccggacacaagaccttagtgccagagctgattaaggagctgaactccctaggtcgcccagacattcttgtaatgtgtggcggagtgatccctccgcaggactatgaattcctcttcgaagttggggtcagcaacgtgttcgggcctggtacccgcatccccaaggcagctgtccaagtcttggacgatatcgagaagtgtctcgagaagaaacaacagtccgtt

SEQ ID NO: 22 - DNA, 2250 bp, Artificial Sequence
  Codon optimized sequence that encodes an MCM polypeptide with the I671V mutation
atgttgcgagccaaaaatcaattgtttctgttatctccacattacctgagacaggtgaaggagagttctggtagtaggctgattcaacagaggttactccatcagcagcaacccctgcatcctgagtgggcggctctcgcgaagaaacaactgaaaggaaaaaaccctgaagatttgatttggcacactcctgaggggatttcaatcaagccgctgtactccaagcgcgacacaatggatttgcctgaggagttgcccggcgttaagccgttcacccgagggccctaccccactatgtacaccttccgcccctggacgatccggcagtatgcgggattcagtacggtggaagaaagtaacaaattttataaggacaacattaaagcaggccaacagggcctaagcgtggctttcgacctggctacccataggggatacgactcagacaacccccgagtacggggagacgtggggatggcgggagttgccattgacacagttgaagacaccaaaatcctgtttgatggcatccccctggagaaaatgtctgtttccatgacgatgaatggtgccgtgattcccgtgctggcaaatttcatcgttacaggggaagagcagggcgtgccaaaagagaagctgaccggtaccatacagaatgatattctgaaagagtttatggtgcggaacacatacatcttcccccctgagcctagcatgaagataatagcagacatttttgagtacaccgccaagcatatgcctaaatttaacagcatcagtatctccggctatcacatgcaggaagccggggcagatgctatactggagctggcttacactctggcagacggactggaatactctcgaacaggactgcaagcgggactgaccatcgatgaatttgctccacgactgtcgttcttttggggaatcggcatgaacttctatatggagatcgccaagatgcgggcaggccgtcgtttgtgggctcatctgatcgagaagatgttccaaccaaagaattccaaaagtttgctgctccgggcacactgccaaacttcagggtggagcctgacagaacaagacccctataataacattgttagaacggccatagaggcgatggcagctgtcttcgggggcacacagtccttgcacacaaacagctttgacgaagccttgggccttccaactgtgaagtcagccaggattgccagaaacacccagatcatcatccaagaggaatctggcatccccaaagtggccgacccctggggcggcagctatatgatggagtgtctgaccaatgacgtgtatgacgcagcactgaagctcatcaatgaaatcgaggagatgggcggaatggccaaggccgttgccgaaggaataccgaaattgcggatagaagaatgtgcggcccggagacaggccaggatcgacagcggttctgaggtgatcgtgggtgtcaataagtatcagctcgagaaagaagatgccgtggaggttctggccattgataatacgtctgtgcgtaatcgacagattgaaaaactcaaaaaaatcaaatccagcagggaccaagcgctggccgagcgatgtctggcagctctcacagaatgtgcggcttcaggggatggcaatatcctagctctggccgtcgatgcaagccgagcccgatgtactgtgggcgaaattactgacgcgctgaagaaggtgttcggagagcataaggcaaatgatcggatggtgtccggcgcttaccgccaagagtttggcgagtcaaaagagattacgagtgccattaagcgggtgcacaaattcatggagcgcgagggtcgcaggcccaggttgcttgtggcaaaaatggggcaagatgggcacgaccgtggagcaaaagtgatcgccacaggattcgccgatcttggttttgacgtcgatattgggccattgtttcagactcctagggaagtggcccagcaagctgtcgacgccgatgtgcatgccgttggggtctccaccctggctgccgggcacaagacactggtgccagaactgattaaggaactgaattctctgggacgacctgacattctggttatgtgtggtggcgttatccccccacaggattatgaattcctattcgaggtaggagtgtctaatgtgttcgggcctggtacgagaatcccaaaagctgcagttcaagtgctggatgacattgagaagtgtctggaaaagaaacaacagtcagtg

SEQ ID NO: 23 - DNA, 2250 bp, Artificial Sequence
  Codon optimized sequence that encodes an MCM polypeptide with the I671V mutation
atgcttagagctaaaaaccagttgttcctgctgtcgccgcactatctaaggcaggtaaaagagtcgagcggctctcggctgatccagcaaagactattacaccagcagcaaccgctgcatcctgagtgggctgcactagccaagaaacagctaaagggcaagaatccagaggacctgatatggcacactcccgaaggcatttctattaaacccctctatagcaagcgtgacaccatggatcttcctgaagaactccccggcgtaaagcccttcacgcggggcccctatcccactatgtacaccttccgcccctggactattcgtcagtacgccggtttctccaccgtggaagaatctaataagttctacaaagacaatatcaaggccgggcagcagggactcagcgtggcttttgatctcgctacccatcgcggttacgacagtgacaaccctcgcgtgagaggtgatgtcggtatggcgggagtggcaatagataccgttgaagacactaagatccttttcgatggcattcccctggagaagatgtcggtgtccatgacgatgaatggagcagtcatccctgtgttagcaaatttcatagtaaccggagaggaacagggtgtccctaaggagaagctgacaggaaccatccagaacgatattctaaaggaattcatggtcaggaatacctatatctttccgcccgaaccaagtatgaaaatcatcgccgacattttcgaatataccgctaaacacatgccgaaattcaacagcataagcatttcaggctatcacatgcaggaggccggagcagacgcaatcttagaactggcttacacactggcggatggactagaatactctaggactggcctgcaggccgggctcacaattgacgaatttgctccacggctttcttttttctgggggatcggtatgaacttctacatggaaatagccaagatgagagctgggagacggctgtgggcacacctgatcgaaaaaatgttccagccgaaaaatagtaaaagcctgctgctgagagctcactgccagacgagcggctggtctctgacagagcaggacccttacaacaacatcgtccgcaccgctattgaggccatggccgccgtatttggcggaactcagtccttgcataccaatagtttcgacgaagctctgggattgcccaccgttaaatccgctcgtatcgcccgcaacacgcagataattattcaggaagagagtggcattcctaaggttgctgatccttggggagggagttacatgatggaatgtttaaccaacgacgtgtatgatgccgccctcaagctgatcaatgaaatcgaggaaatgggagggatggcaaaagcggtggcagaaggaattcctaagctcaggatcgaggaatgtgctgctcggcgacaggcacgcattgactccggaagtgaagtgatcgttggcgtcaataaatatcagttggagaaagaggacgcggtcgaagtcctcgctattgacaatacctccgtccgcaacaggcagatagaaaaactcaagaaaatcaaatcgagtcgcgatcaggctctggccgaacgttgcctggccgctctcaccgaatgtgccgcaagtggcgacggcaacattttagcccttgccgttgacgccagccgagcaaggtgcacagtgggggagatcacagatgcccttaaaaaagtgtttggagagcataaagccaacgacagaatggtttctggagcctatcgacaagagtttggagagtccaaggagatcaccagtgccattaagcgcgtgcacaagtttatggagcgcgaaggccggagaccccggctgctagtcgccaagatgggccaagacggacatgaccgaggcgctaaagtaattgcgaccggatttgccgatcttggatttgatgtcgatattggacctctgttccagacccctcgcgaagtagctcagcaggccgttgatgccgatgtgcacgccgtaggcgtatccacgctggcagcaggacataagaccctggttcccgagcttatcaaggagctcaattctctaggcagaccagacatactggttatgtgcggcggcgtaatcccccctcaagactacgagttcctgtttgaggtgggggtgtcaaatgtattcggccctgggactcggatccccaaagcagcagtgcaagtgctggatgacattgaaaaatgcctcgaaaagaagcaacagagtgtg

SEQ ID NO: 24 - DNA, 2250 bp, Artificial Sequence
  Codon optimized sequence that encodes an MCM polypeptide with the I671V mutation
atgcttcgggctaagaaccagttgtttctccttagtccccattacctccgacaggtcaaggaatcttcaggttctcgcctcatccaacaacgcttgctgcatcagcagcagcccctgcaccccgaatgggctgccctcgcaaagaagcaattaaaaggtaagaacccggaggacctgatctggcatacacctgagggcatttccataaagcccctctattcaaaacgcgacaccatggacctacccgaagaactgccgggagtaaagccatttactcgggggccttaccccaccatgtatacatttcgcccctggacaattcggcaatacgccggattctccaccgtggaggaatcaaataagttttataaggacaacatcaaggcaggacagcagggactttctgtagcattcgacctcgccactcacagaggctacgactcagacaacccacgagtcaggggcgatgtgggtatggccggcgtggctatagacacagtggaggacactaagatactttttgacggcatccctctggagaaaatgagcgtgagcatgactatgaatggagccgtaatccctgtcttagcgaacttcatcgtcaccggagaagagcagggcgtacccaaagaaaagcttacagggaccatccaaaacgacatcctcaaagagtttatggttaggaacacctatatttttccgccagagcctagcatgaaaattatcgccgacatctttgaatataccgccaagcatatgcctaagtttaattctattagcattagcggctaccatatgcaagaggccggggctgacgccatcctcgagctggcctacaccctggccgatggattagagtactcaagaacaggccttcaagccggtctaactatagatgaatttgcccctagattatcatttttttggggcattggaatgaatttttacatggagatcgctaagatgcgggctggccggaggttgtgggcccacctgattgagaaaatgtttcaacctaagaacagcaaaagccttttgctacgtgcccactgtcagaccagtggctggtccctaaccgagcaagacccctacaacaacatagtcaggacagctatagaggctatggcagcagttttcggcggaacacaatccctgcacactaactccttcgatgaagctctcggactgccaacagtcaaatccgcccggattgcccgaaatacacaaatcatcattcaagaggaatccggcatccctaaagtggccgacccttggggcggcagttacatgatggagtgtttgaccaacgatgtttacgacgctgccctgaaactgattaatgagatcgaggaaatgggggggatggccaaagcagtagccgagggaatacctaaactgcggattgaagagtgcgcagctagacgccaagctcgtatcgatagtggatccgaggtgattgtcggagtgaataaatatcagcttgagaaagaggatgctgtggaggtgctggctattgataataccagcgtgcggaacagacaaatcgaaaagctgaagaaaataaaatcaagccgagaccaggcactcgccgaacggtgccttgctgccctaaccgagtgcgcagccagcggcgatggcaacatcctagctctagccgtggatgcatcacgcgctagatgcactgtgggggaaatcacggacgctcttaaaaaggtctttggggaacacaaggcaaatgacaggatggtatcaggcgcctacaggcaagagttcggggagtcaaaagagattacctcagccataaagcgagttcacaaattcatggaaagagaggggagacgaccccgactgttggtcgctaagatggggcaggacggccatgacaggggagcaaaggtgatcgccaccggatttgccgatttggggttcgacgtcgacatcggacctttgttccagacacccagagaagttgcccagcaggccgttgatgcggacgtccatgccgtgggtgtgtccacactggccgcgggacacaagaccctggttcccgaattgatcaaagagctcaacagcctgggacggcctgacatcctcgttatgtgtggaggcgtaatcccaccccaggattatgagttcctgttcgaggtgggagtgtccaacgtgtttggccccggcacgagaattcctaaagctgctgttcaagtgctggatgatatcgagaaatgccttgagaagaagcaacaaagcgtc

SEQ ID NO: 25 - DNA, 2250 bp, Artificial Sequence
  Codon optimized sequence that encodes an MCM polypeptide with the I671V mutation
atgctgcgcgcaaaaaaccagcttttcctactctccccccattatctccggcaggtcaaagagtcatccggttccagactgattcagcagagactcctgcaccagcaacagccactgcatccagaatgggcagcattagcgaaaaagcagcttaagggaaagaatcccgaagatctaatctggcacacaccggaaggaatcagcatcaaacctctttacagcaagcgggatactatggacctccccgaagagctccccggtgtgaagccatttaccagaggaccttatccaactatgtacacgttccggccgtggacaatccgacagtatgctggcttctctaccgtggaggagtccaacaagttctacaaggacaatattaaggcggggcagcagggactctccgtggcattcgatctggctacccaccgagggtacgattccgacaatccgagggtgaggggcgacgtggggatggcaggcgttgccattgatacagtagaggatactaaaattttgttcgatggcatccccttagagaagatgtccgtatccatgaccatgaatggtgccgtcattcctgttctcgctaatttcattgtaaccggagaggaacaaggtgtccctaaggagaagctgaccggtacaatacaaaatgatatacttaaagagtttatggtgcgcaatacgtacattttcccaccggaaccaagcatgaagatcattgccgatatctttgaatataccgccaagcatatgccgaagttcaattccattagcatttcaggctaccatatgcaggaggcaggcgccgatgccattctcgaactcgcctacacactggcggatggcctcgagtattcaaggaccggtctgcaagcaggcctgacaattgacgaatttgccccccgactgtcttttttctggggcatcgggatgaatttttatatggagattgcaaagatgcgggcaggacgacgcttgtgggctcacctcattgaaaaaatgtttcaaccaaagaactctaaaagcttactgctcagggcacactgccagacttcaggctggagcctgacggagcaagacccctacaataacattgtgaggacggctatcgaggccatggcggccgtgtttgggggtacccaaagcttgcacactaactctttcgacgaggcgctgggtttaccgaccgtgaagagcgctagaattgctcggaacacgcagattattatccaggaagagtcagggatcccaaaggttgccgatccttgggggggcagttacatgatggaatgcctgactaacgatgtttatgacgctgcactaaaattgatcaatgaaatcgaggaaatgggagggatggccaaggcagtagccgaaggcattcccaaactacgcatcgaagagtgcgccgctaggcgacaggctaggatagatagcggttccgaggttattgtcggtgtcaataaatatcagctggagaaggaagatgccgtggaggttctggctattgataacacctcagtgaggaatagacagattgaaaaactgaaaaagatcaagtccagccgggaccaggcactggcagaacgatgccttgccgcgctgacagagtgcgcagcttcgggggatggtaatattctcgcgctggccgtggacgcaagtcgggctaggtgtacagttggagaaataaccgacgctctcaaaaaagtctttggcgagcacaaagcaaacgaccgaatggtgagtggtgcatatcgtcaggagttcggagaaagcaaggagattacgtcagctatcaagagagtgcacaaatttatggagagagaggggaggcgtccacgcttacttgtggccaagatggggcaggacggccacgataggggcgctaaagtgatcgccactggattcgcggacctgggcttcgacgtggacattgggccattattccagacaccccgcgaagtggctcaacaggcggtggacgcggacgttcacgccgtaggagtatcaaccctagccgcggggcacaaaaccttggtgccggagcttattaaggagctcaacagcctcggcagaccagacatccttgtgatgtgtgggggtgttatccctccgcaggattacgaatttctcttcgaggttggggtgagcaatgtgtttggaccaggtacgagaatccccaaagcggccgtccaagtccttgacgatattgaaaaatgtttagaaaaaaagcaacagtcagtt

SEQ ID NO: 26 - DNA, 2250 bp, Artificial Sequence
  Codon optimized sequence that encodes an MCM polypeptide with the I671V mutation
atgctgcgcgccaagaatcagttgtttttgttgagtccacactacctgagacaggtaaaggagagctccggcagcaggttgatccaacagcgcctgttacaccagcagcaacccctgcacccggaatgggctgcacttgccaagaaacagctgaaagggaaaaaccccgaggatctgatttggcacacgccagaaggtatcagtattaagccactgtatagtaagcgagacacaatggaccttccggaagagctcccaggggtgaaaccttttacgcgtggaccttaccctactatgtatacatttcggccttggaccatccgccagtatgccggattctccactgtagaagagagcaataagttctataaagataatatcaaggcaggacagcaaggtttgagcgtggcctttgatttagccacccacagaggatatgatagtgataatccacgggttaggggtgacgttggaatggccggagtcgcaatcgatacagtcgaggatacaaagatcctgttcgacggcattcctttagaaaaaatgagcgtcagtatgaccatgaatggggccgttattcctgtcctcgccaacttcattgtaaccggagaagagcagggcgttcctaaagagaaattgacggggacgattcagaatgacattttaaaggagtttatggttaggaacacttacatattccctcccgagccatccatgaagataattgcagatatcttcgagtacaccgccaagcatatgcccaaattcaattctatttccataagcggctatcatatgcaggaggcaggggccgatgctatcctggagttagcttataccctcgccgacgggctggaatattctcgtacaggcctgcaggcgggtctgactattgacgagttcgctcctcgccttagctttttttgggggattggtatgaatttctacatggaaatagctaaaatgcgcgccggcaggagactgtgggcccatctgatcgagaagatgttccagcccaagaatagcaaatccttactgttgagagctcactgccaaacctcaggatggtccctgacagaacaggatccttataataacatcgttcgcaccgccattgaggccatggcagccgtctttggtggaactcagagcctgcataccaacagtttcgacgaggcgcttgggctgccgacagtcaagagtgcccgaatcgcaagaaatacccagattattattcaggaggaaagtggcatccccaaagtcgctgatccctggggagggtcttacatgatggagtgtctaactaatgacgtttatgatgccgccttgaaactgatcaatgagatagaggagatgggcggaatggccaaggccgttgcagagggcattccaaaattacgcatcgaggagtgcgccgcaaggcgtcaagcccgcatcgattcaggaagtgaggtcatagtgggtgtcaacaaataccagcttgaaaaggaggacgccgtggaggtgcttgcaatcgataacactagcgtcagaaatcgacaaatagagaagcttaaaaagatcaaaagctcacgggatcaagctcttgctgagagatgcctcgcagccctcaccgagtgtgccgcttccggggatggcaacatactggcgctcgccgtggatgcatctagggctaggtgtacggtgggtgagattactgatgccctgaagaaggtttttggagagcataaggcaaatgacaggatggttagtggagcatatcgtcaagagtttggcgagagcaaggagattactagcgccataaaacgggtgcacaaattcatggaacgagagggcaggcggcctaggcttctggtcgctaaaatgggacaagatggacatgaccggggtgctaaagtgatcgccacaggctttgctgacttggggttcgacgtcgacataggaccactgttccaaaccccccgggaagtcgcgcagcaggcggtcgacgctgatgtccacgctgttggtgtgagtaccctcgcagccggacacaagacacttgtgcctgagcttatcaaagagttaaattccctaggccggccggatatactcgtgatgtgcgggggggttatcccaccccaggattatgagtttctgttcgaggtgggcgtgtctaacgtattcgggcctggcaccagaattcccaaagccgcagttcaggttctagacgatatcgagaagtgcctggagaaaaagcaacaatcagtc

SEQ ID NO: 27 - DNA, 2250 bp, Artificial Sequence
  Codon optimized sequence that encodes an MCM polypeptide with the I671V mutation
atgcttagggccaagaatcaactgttccttcttagcccgcattaccttcgccaggttaaggagtctagtggatccaggctaatccagcagcggctgctacaccaacaacagcctctgcacccagagtgggctgccctcgccaaaaagcagctgaagggaaaaaacccagaggatctcatttggcatacccctgagggaatttctattaagccgctctatagtaaaagggacactatggatctgccggaggagctccctggagtgaaaccctttaccaggggcccatacccgacgatgtatacttttcggccttggactattcggcagtatgccggattcagtactgtggaggagtcaaacaaattctacaaggacaatattaaagccggtcagcagggtctgtccgttgctttcgacctagctactcatagggggtatgatagtgacaatcctcgcgttcgcggagacgtcggtatggccggggtggctattgacaccgtcgaggataccaagatcctgtttgacggcatcccactagaaaagatgagcgtgagtatgaccatgaacggcgcggtgatccccgttctggcaaactttattgttacgggagaagagcaaggagtacccaaagagaaactgacaggaaccattcagaatgacattctgaaagagtttatggtccgaaatacttacatcttcccacctgagccttctatgaaaataatcgcagacattttcgaatacacagcgaagcacatgccaaagtttaactcaattagcattagcgggtaccatatgcaggaagccggtgctgatgccattctagaacttgcctacactctggcagatggcctagagtactcgcggacaggtctgcaggcaggcctgacaatcgatgaattcgcccctcgcctgtctttcttctggggaattgggatgaatttttatatggaaatcgctaaaatgcgagccggacggaggctgtgggcacatcttatcgaaaagatgttccaacccaagaatagcaaatctctgctgctgcgggcccattgccaaacctctggatggtccctgaccgagcaggatccctataataatattgtacgtacggccatagaagcaatggctgcagtctttggcggcacacagagcctccacactaacagcttcgatgaagccttgggccttccgaccgttaagtcagctaggatcgcgcgtaatacccaaattatcatccaggaagaaagcgggattcccaaggttgccgatccctgggggggatcttacatgatggagtgccttacaaacgacgtatacgatgccgcgctgaaactcattaatgaaattgaggagatgggcgggatggctaaggccgtagccgaaggcatccctaagcttagaatcgaagagtgtgctgcaagacggcaggctaggattgactcgggctccgaggtcatcgtcggcgtgaacaagtaccaactggaaaaggaagatgcggtcgaggtgctggcgatcgataatacctcagtcaggaacagacaaattgagaaattaaagaaaatcaaaagcagtcgcgaccaggccttggctgagcggtgtctcgctgccctcacagagtgcgccgcaagcggcgatggcaacatactagccctcgctgttgatgcatccagggcgcggtgcaccgtgggagagataactgacgccctcaaaaaggtattcggggaacataaggctaacgacagaatggtgagtggagcttaccgccaggagtttggtgagagtaaggagataacatcagccataaagagagtgcacaagttcatggagagagagggccggcgacccagactgctcgtggccaagatgggtcaagacggacatgaccggggcgccaaggtgatcgccaccgggttcgcagacctcgggtttgatgtcgatatcggaccgttgttccagaccccacgggaggtcgcccaacaggccgtggatgcggacgtgcatgcagtaggagtgagtaccctcgccgccgggcacaagacattagtccccgagcttataaaggaactcaattcactcgggaggcctgacatactcgtgatgtgcggaggcgtgattcctccacaggactacgaattcttgtttgaggtcggggtgtccaatgtctttggccctggcacgcgtattcctaaagcggcagttcaggtgctcgacgatatagagaagtgcctggagaagaagcagcagtctgtc

SEQ ID NO: 28 - DNA, 2250 bp, Artificial Sequence
  Codon optimized sequence that encodes an MCM polypeptide with the I671V mutation
atgctcagggctaaaaatcaactttttctgctctcgccccactaccttcgccaggtgaaggagtccagcggcagtagacttatccagcagcgtctgttgcatcagcaacagccactgcaccctgagtgggcagcgctggctaagaagcaactcaagggcaagaaccctgaggatctcatctggcacacaccggaggggattagtatcaaacccttgtactcgaagcgggataccatggatctgcctgaagaattgccgggagtcaagcccttcacaagaggcccttatcccaccatgtacacatttaggccctggaccatccgccaatatgctggcttcagtactgtggaggaatcaaataagttttataaggacaatatcaaagccggccaacaaggcttgtctgtggcatttgatcttgctacgcaccggggctacgattccgataacccccgcgtgcgcggagacgtcggcatggcaggcgtggccatcgacactgtggaggacactaaaattttatttgacggtattccactcgaaaaaatgtccgtgagtatgaccatgaacggtgccgtgattcctgtactggccaatttcatagtgactggtgaggaacagggagttcctaaagagaagctgaccggtactatccaaaatgatattcttaaggagtttatggtaagaaatacttacatctttcccccagagccctctatgaaaatcatagctgacatattcgaatacaccgcaaaacacatgccaaaattcaatagcattagtattagtgggtaccacatgcaggaagctggagctgacgcgatcctggaactggcctacaccctggcagatgggctagagtacagcagaaccgggctacaggctggtctcacaatcgacgagtttgctccccggttaagttttttctggggcatcggtatgaacttttacatggaaattgccaagatgcgggcaggaaggcgtctttgggctcatctgatagaaaaaatgtttcagcccaaaaacagtaaatcgttgttgctccgagcacactgccagaccagcggttggagcctgacggagcaagatccttacaacaatattgttcggactgctatagaagccatggctgccgtatttggcgggacacagagcctccacactaattctttcgacgaggccttggggttgcctaccgtgaagagcgctcgtatcgcgaggaatacacaaataattattcaggaagaatcaggcattccaaaagtggcagacccgtggggaggaagttacatgatggagtgtctcactaatgatgtgtacgatgccgccctgaagctgattaatgaaattgaagagatgggagggatggctaaggcagtggccgaaggtattcccaagctccggattgaagaatgtgcagccaggcggcaggcccgtatagactcaggctccgaggtgatagttggagtaaataaatatcagctggagaaggaggatgcggtcgaagtcttggccatcgacaacacatccgtgaggaatcgccagattgaaaagcttaagaagatcaagtcaagcagagaccaggccctcgcagaaaggtgcctggctgctctgaccgagtgtgccgctagcggagacggcaatatcctagccctcgccgtggatgcctctagagctcgatgcacagtgggcgaaattacagatgccctgaaaaaggtctttggagagcacaaggcaaatgacagaatggtctcaggcgcgtacagacaggagttcggggaatcaaaggagatcacaagtgcaattaagcgggtccacaagttcatggagcgggaagggcggagaccccggcttctggtcgcaaagatgggacaggatgggcatgacagaggtgccaaagtgatcgccacaggatttgccgatttgggattcgacgtggatataggtcccttatttcagaccccgcgtgaagtagcgcaacaggcagtggacgcagacgtccacgccgtcggggtgagtaccctggcggcgggacacaaaactctagtccccgagctcattaaagagctcaactctctgggcaggcccgatatcctagtaatgtgtgggggggttattccaccccaggactacgagtttctatttgaagtgggagtgtccaacgttttcggccctggcacaagaattccaaaggccgccgtgcaagtgctcgatgatatcgagaagtgcttggagaagaaacagcagtctgtt

SEQ ID NO: 29 - DNA, 2250 bp, Artificial Sequence
  Codon optimized sequence that encodes an MCM polypeptide with the I671V mutation
atgttgagagccaaaaaccagctcttcctgctgagccctcactacctcaggcaggttaaagaaagctctggctcacgtctaatccagcaacgcctgctccaccagcagcaacccctgcatccagagtgggccgctttagccaagaaacagctgaaaggtaagaatcctgaggatcttatttggcatactcctgagggtatcagcatcaaaccactgtattcaaagcgggataccatggacctgcccgaggaacttccgggggtgaagcctttcacacgggggccctacccaaccatgtatacattccgaccttggacaatccgccagtatgcggggttttctactgtggaagaatctaacaagttctacaaggacaacattaaagctggacagcagggtctctccgtcgcctttgacttggccacacatagggggtacgactctgacaaccctagggtccggggcgatgtgggtatggcaggcgtggcaattgacaccgtcgaggacactaaaatcctctttgacggcatccccttggaaaagatgtctgtatcgatgaccatgaatggcgcagttatccctgtgttggccaactttatcgtaactggggaagagcagggtgtcccaaaagaaaagttaacaggcaccatccagaatgacatcctcaaagagtttatggtccggaatacatatatctttccaccggagccgtccatgaagattattgccgatattttcgagtatactgccaaacatatgcccaagttcaatagcatctctattagcggttatcacatgcaggaggccggcgcagacgccatattagaactggcttacacattggctgatggcctggaatatagtcggaccggccttcaggctggtcttaccatcgatgagttcgcaccacgcttaagtttcttctggggaattggaatgaatttctatatggaaatcgcgaaaatgcgtgcaggtcgccggctctgggctcatctgatcgagaagatgtttcaacctaagaattccaagagcctgctgctccgagctcattgtcagaccagtggttggagcctaaccgagcaagacccttacaacaatatcgtgcggaccgccattgaagccatggcagctgtttttggtggcacccagtctttgcataccaactcgttcgatgaagcgcttggactaccaaccgtgaagtctgcccggatagctcgaaacactcagattattatccaggaggagtcggggatacccaaggtcgctgatccttggggcggtagctatatgatggagtgtttgacaaatgacgtgtacgacgcagccctcaagcttattaacgaaattgaggaaatgggtgggatggcaaaagctgttgccgagggaatccccaagctgagaatcgaggagtgtgccgcacggaggcaggctcgtatagacagcggtagcgaggttatcgtgggagtgaataagtaccaacttgagaaggaagatgctgtcgaggttcttgctattgacaacaccagtgtgcgcaatcgccagatagagaaactgaagaaaatcaagagctcaagagaccaggcactagccgagcggtgcctggccgcattgacggagtgcgccgcatccggcgatggcaatatactcgccttggctgtagacgcctcacgcgcccgctgtacagtcggtgagataaccgatgcactcaaaaaggttttcggcgaacataaggccaacgaccgaatggtgtctggagcctatcggcaggaatttggggagtctaaggaaatcacatctgcgatcaagcgggtgcacaagtttatggaaagagaaggacgccggccaagactcctggtcgccaaaatgggccaggatgggcatgatcggggggcaaaagttattgccaccggatttgctgatttgggatttgatgtcgatattggcccactcttccagactccacgcgaggtggcccagcaggctgtggacgctgatgtccatgctgtcggtgtgagtactttggcagccggccataagacccttgtcccggagctcatcaaggagttgaattccttaggtcgcccggatattttggttatgtgtggaggcgtaatacctccccaggactacgaatttctgtttgaggtcggtgtgagtaatgtattcggtccgggaactaggatcccaaaggctgctgtgcaggtcctggacgatatcgagaagtgccttgagaagaagcagcagtctgtt

SEQ ID NO: 30 - DNA, 2250 bp, Artificial Sequence
  Codon optimized sequence that encodes an MCM polypeptide with the I671V mutation
atgcttcgcgcgaagaatcagttatttctgctgagcccccactacctgcggcaggtgaaggagtcctcaggaagtcgcctgattcagcagagactgttgcaccagcagcagcccttgcaccccgaatgggccgcacttgctaagaagcagttaaagggtaaaaaccctgaagatttaatttggcacaccccagagggcatttccatcaaaccattgtattctaagcgggatacaatggatctaccagaggaactccccggggtcaagccatttactaggggaccataccctacgatgtacacatttcgaccatggactatccgccagtacgcagggttttccaccgttgaggagagcaataaattttacaaggacaatataaaagccggacagcagggactgagtgtggcatttgatctggctacccaccggggctatgattcagacaacccaagagtgagaggcgatgtgggcatggccggcgtggccatcgatacggtggaggacactaagattctttttgacgggattcccctggaaaagatgagtgtgtccatgaccatgaacggcgctgtgatacccgttcttgctaattttatcgtgactggcgaagagcaaggcgtgcctaaagagaagctcacgggcaccatccaaaatgacattctcaaagagttcatggtgcggaacacatatattttcccacccgagccttcaatgaaaatcattgccgacattttcgagtataccgcaaagcacatgcctaagtttaactccatatctatttctggctaccacatgcaagaggccggcgctgacgcgatcttagagcttgcatacacacttgccgatggtttggaatacagccgcacggggttgcaggccggattaactatcgatgaattcgctccaaggctgtcatttttctgggggataggaatgaatttttatatggaaatagcaaaaatgcgagcaggccgccgcctctgggcccaccttatagaaaagatgtttcagcccaaaaactcaaagtcattactcctccgtgcccattgccaaacatccgggtggtcattgaccgaacaggacccttataacaacatcgtgcgtacagctatcgaggccatggctgccgtcttcggagggacacagtctttgcacacaaacagctttgacgaggctttgggactgcctaccgtgaaatctgcacggatcgcacggaacacacagatcatcatccaggaggaatctggcattccaaaggtggccgatccatggggggggagttacatgatggagtgtctgactaacgacgtctacgatgccgctctaaagctgatcaatgaaattgaggaaatgggcggtatggccaaggccgtggccgaaggcatccccaaattgaggattgaggagtgtgctgcccgaaggcaggcaagaattgattcagggtctgaagtgatagttggggtcaacaagtatcaactggaaaaggaagacgcggtagaagtgctggctatagacaacacctctgttaggaacagacaaattgagaagctgaaaaaaatcaagtcatcccgggaccaggctctggctgaacgatgcctcgccgctctcactgagtgcgccgcatccggggacggcaatatactggccctcgccgtggacgccagtagagctcgttgcactgtcggcgagataaccgacgcacttaaaaaggtttttggggaacataaggccaacgacagaatggtgtctggagcgtaccggcaggaatttggggagtcaaaagagatcacctccgccatcaaaagggtccataagttcatggagcgcgaaggcagacggccaagactcctcgtggctaagatgggtcaggatggacacgaccggggagcgaaggttatagcaacaggctttgctgatctaggctttgatgtggatataggaccgcttttccagacccctagagaagtcgcacagcaggctgtggacgccgacgttcacgccgtgggcgtgtctacgctcgcagctggtcacaagactctggtacccgaactgattaaggagctaaattcattaggaaggccagatattctggtgatgtgtggcggcgtgatcccaccgcaggactacgaattcctgttcgaggttggagtaagtaatgtattcggacccggaaccaggataccgaaggccgcagtgcaggtactggacgacattgagaagtgcctcgaaaagaagcagcagtcagtg

SEQ ID NO: 31 - DNA, 2250 bp, Artificial Sequence
  Codon optimized sequence that encodes an MCM polypeptide with the I671V mutation
atgctgcgggcaaaaaatcagctctttttgctctcacctcactatttgcgccaggtcaaggagtctagcggatcaaggctgattcagcagcggctgttgcatcagcagcagcctctacatcccgaatgggctgccctggctaagaagcagctcaaaggcaagaaccctgaggatttgatttggcacacccccgaggggatatctattaagccactatacagtaagcgggacacaatggatctgcccgaggagctccctggagtcaagccttttacccgtggaccgtacccaactatgtacactttccggccctggacaattcgtcaatacgcaggtttctcaaccgtcgaggaatcaaataagttttacaaggataatataaaggctggacagcagggattgtctgtcgccttcgacctcgccactcatagagggtacgactccgataacccacgtgtgcgtggcgacgtcgggatggccggtgtggcaatagatacagtggaagatacaaagatcctgtttgatggcattcctctggaaaagatgagcgtgagcatgaccatgaatggtgccgtcattcccgtgctcgcgaattttatcgttactggagaagagcagggagttccaaaagaaaagttgactggcaccatccagaacgacatactgaaggagtttatggtgaggaatacttatatatttccacccgagcccagcatgaagattattgcagatattttcgagtacaccgctaagcatatgcccaagtttaacagcatcagcataagtggataccacatgcaagaggcgggtgccgacgccattcttgagctggcctatacgttagctgatggtttggaatatagtcgaactggattgcaggcaggcttgactatcgacgagtttgccccacggctttcattcttttggggtataggaatgaacttctacatggaaatcgctaaaatgcgcgccgggaggcggctgtgggctcatttgattgagaagatgtttcagcctaagaacagcaaatcgctgctgctgcgcgcacactgtcagacgagcgggtggtcactaacagagcaagatccttataacaacatcgtcagaacggcaatagaagccatggccgccgtgtttggaggaacccagtccctccataccaactcctttgacgaggctcttggcctgcccactgtgaaatctgcgaggattgcccggaatacccagatcatcatccaggaggaaagtggaatcccaaaggttgctgacccctggggaggttcttacatgatggagtgtttaactaacgacgtatacgatgccgctctgaaacttatcaatgagatagaggaaatgggaggcatggcgaaagcggtggccgaagggatccccaagttacgtatcgaagagtgtgctgcgagaagacaggcccgcatcgatagcgggtcagaagtcattgtgggggtcaacaaataccagctggaaaaggaagatgctgtggaagtcctggcgattgataatacatctgtgcggaataggcagatagaaaagcttaagaagatcaagtcgagccgagatcaggccctagcagaacgctgtctggctgccctgacggagtgtgctgcgagcggcgatggaaatatcctggcactggccgtcgacgccagccgtgccaggtgcaccgtgggtgagataaccgacgcccttaagaaagttttcggcgaacataaagccaacgataggatggtatccggcgcttatagacaagagtttggcgaatctaaggagatcacaagtgcgattaagagggtacacaaatttatggaaagagaaggcagacgtccgcggcttctagtggccaaaatgggccaagatgggcatgatcgaggcgctaaggttattgctacagggtttgccgatctgggtttcgatgttgatattgggcccctgtttcaaacacccagagaagtggctcaacaggccgtggacgccgacgtgcacgccgtgggggtcagcacactggccgccggccacaagaccctggttcccgagctgatcaaggaactgaactctcttggacgcccagatatcctcgtgatgtgtggtggagtcatcccccctcaggattacgaattcctgtttgaggttggcgtgtcaaacgtttttggtcctggtacgcgcatcccgaaagcagcagtgcaagtgctggatgatatcgagaagtgcttggaaaaaaaacagcagagtgtc

SEQ ID NO: 32 - DNA, 2250 bp, Artificial Sequence
  Codon optimized sequence that encodes an MCM polypeptide with the I671V mutation
atgctgcgcgcaaaaaatcagctcttcctccttagtccccattacctgcggcaggtgaaggagagtagcgggagccggctgatccaacagcgattgctgcatcagcagcagcctctgcacccagaatgggccgccctcgccaagaaacagcttaagggaaagaaccctgaggacctgatctggcacacacccgagggcattagtatcaagcccctgtactcgaaaagggatactatggacctgccggaagagttgccaggcgttaagccgtttactagagggccgtatcctaccatgtacacttttcgaccatggaccatacggcaatatgcaggcttttctactgtcgaggagagcaataagttctataaagacaatatcaaggccggccagcagggccttagcgtggccttcgatctggctacccatagagggtacgatagtgacaatccacgggtgcgcggcgacgtcggcatggctggtgttgccatagacacagtggaggacacaaaaatcctgttcgatgggatccccctggagaagatgagcgtctccatgacaatgaacggcgcagtcattcccgtgctggcgaacttcatagtgactggggaggaacagggcgtgcctaaggagaagttgactggcaccatccagaatgatattctgaaagaatttatggtacgcaatacatacatttttcctcccgaacccagcatgaaaataatagcagacatttttgaatatactgcaaagcatatgcctaagttcaactccatttccatctctggataccatatgcaggaggccggagcagacgccatactggagttggcctatactctggcagatgggttggagtacagcaggacggggctgcaggccggcctcaccattgatgagttcgccccacggctaagcttcttctggggcattggcatgaatttttacatggagatcgcaaaaatgcgcgcggggagacggctgtgggcacacttaattgaaaaaatgttccagcccaagaattcaaagtctctcctgttgcgcgcgcattgccagacctctgggtggtcactgactgagcaagatccatacaataacatcgtgcggactgcaatagaagctatggccgccgtttttggagggactcagtcactgcataccaacagcttcgatgaggccctgggactgccaacggtcaaatcagcacgcatcgctcggaatacccagatcatcatccaagaggagtcaggtatccccaaggtggctgacccatggggtgggagttatatgatggagtgcctgaccaacgacgtgtatgatgcggccctgaagcttatcaatgaaatagaggaaatgggaggaatggcgaaggcagtcgctgagggtatacccaagctgcggatcgaggagtgcgccgcgaggaggcaggctcgcattgactctggaagcgaagtaatagttggagtcaacaaataccaactggagaaagaggatgccgtggaagtcctcgccatcgacaatacatccgttcggaatcggcagattgagaaactgaaaaagatcaagagtagtagggaccaggctttagcggaacggtgcttggctgcgctgaccgagtgcgcggccagtggtgatggtaacatcctggcactggccgtggacgcgtcacgcgctaggtgtacagttggcgagattaccgacgcgctaaaaaaagtgttcggagagcataaagctaacgatcgaatggtgtccggagcctatagacaggagttcggtgaaagcaaggaaataacatctgctattaagcgggtgcataaatttatggagagagagggtaggcgccctaggcttctggttgctaaaatggggcaggacggccacgacaggggggccaaagtaatcgcgaccggttttgctgacctcggtttcgacgtcgacattgggccactcttccagactccacgggaggtggcacagcaggctgtggatgccgacgttcacgccgtaggggtctccacccttgccgcaggccataaaacgctggtgcctgaactgattaaggaattgaacagcttgggaagaccagacatcctcgtgatgtgtggcggagtgattccacctcaggactatgagttcctcttcgaggtcggcgtcagcaacgtcttcggtccaggaactcgcatcccaaaggcagcagtccaggtgctggatgatattgagaaatgtcttgagaagaagcagcaaagtgta

SEQ ID NO: 33 - DNA, 2250 bp, Artificial Sequence
  Codon optimized sequence that encodes an MCM polypeptide with the I671V mutation
atgttacgcgctaaaaaccagctctttctcctgagtcctcattacctcagacaagtaaaagagagctctggatccagattgattcagcagaggttgctccatcagcagcagcctctgcacccagaatgggcagctctcgcaaagaaacaactgaagggcaaaaaccctgaagacctcatctggcatacaccagaaggcatttcaatcaagcctctgtatagtaagcgcgatacaatggacctacccgaggagctacccggtgtgaaaccattcacgcggggtccataccccacgatgtatactttcaggccttggaccatccggcaatacgcaggcttctctaccgtcgaagagagcaataagttctacaaagataacattaaggcaggacagcagggcctgtcggtggccttcgacctggctacccacagaggctatgactccgataacccgcgggtgcgcggggacgtcggtatggcgggagtggccattgacaccgtggaggatactaagatcctcttcgacgggattcccctcgaaaaaatgtcagtgtcaatgacaatgaatggagcagtcataccagtcctggctaatttcattgtgactggtgaggaacagggtgtgcccaaggagaagctgaccggtactatccagaatgacattctgaaagaattcatggtaaggaatacatacattttccccccggagccatccatgaagattatagccgatattttcgaatacacggctaagcatatgcccaagtttaacagcatctcgattagtggttatcatatgcaggaagctggggccgatgccatcttggaactggcttacactctcgccgacggtctggagtacagccgtaccggcctgcaggcaggcctcacaatagacgaatttgctccccggctgtccttcttctggggcatcgggatgaatttctacatggaaattgcgaagatgagagccggtaggaggctttgggctcatctgattgagaagatgttccagccaaagaacagtaagagcctgctgctccgggctcactgccagacttccggttggagtcttacggagcaggatccttacaataacatagtccgtaccgcaatcgaggcgatggctgccgtcttcggcggtacacaaagtctccacactaatagcttcgatgaggcacttggcctacccacggtaaagtcagctaggatcgcacgcaatactcaaatcattatccaagaggagtctggaattccaaaagttgccgacccatggggaggctcctacatgatggagtgcctgaccaacgacgtctacgatgccgcgctgaagcttatcaacgagattgaggagatggggggcatggctaaggcggtggcagagggaattcctaagctgaggatcgaagagtgtgccgcccgcaggcaggcgcgcatcgattccgggtccgaggtgattgtgggagtgaacaagtaccagctggaaaaggaggacgccgtggaggtactggctatcgataacactagcgtgcgtaaccgtcagattgagaagctgaagaaaattaaatcctcgcgtgatcaagcccttgcagaaaggtgtctcgctgccttgacagagtgcgcagcttccggagacggaaatatccttgctcttgccgtggacgcgtcaagggcaagatgcacagtaggcgagatcacggacgcactgaaaaaggtgtttggggaacacaaggctaacgacaggatggtgagcggcgcctaccgacaggagttcggagagtccaaggaaatcacgagtgccatcaagcgggttcacaaatttatggaacgggaggggagaaggcccagactgctagtggccaagatgggccaggatggacatgatcgaggagctaaagtcatcgcaaccgggttcgcagacctcgggttcgacgtagacattgggcctctgttccagacccccagagaagtggcccagcaggcggtcgatgcagacgtacacgctgttggagtttcaacactggcggctggacacaagaccttggtgccggaactcatcaaagagctgaatagcctggggcgacccgatatcctagtcatgtgcgggggggtgatcccgccccaggattatgaattcctcttcgaggtgggcgtttccaatgtgttcgggcctggcacgagaattcctaaggccgctgtccaggttctcgacgacatcgaaaagtgcctcgaaaagaagcaacagagcgtg

SEQ ID NO: 34 - DNA, 2250 bp, Artificial Sequence
  Codon optimized sequence that encodes an MCM polypeptide with the I671V mutation
atgctgcgtgcgaagaatcagctgtttctgttgtccccacattacctccgccaagtgaaagaatcgagcggttcacggctcattcagcagagactcctgcatcagcagcagccgctacaccccgaatgggctgccctggcgaaaaagcaactgaaaggcaaaaaccctgaggatcttatttggcatacacctgagggaattagcattaagccattgtactctaaacgcgacacaatggatctcccagaagagctacctggcgtcaagccgtttacccgcgggccctaccccacgatgtacacttttagaccatggacgattcgccagtatgctggtttctcaactgtcgaggagtcgaacaaattctataaggataacattaaagccggacagcaagggctctctgtggcctttgacctagcaacccatcgcggatatgacagcgacaaccccagagttaggggagacgtgggaatggccggcgtggcgatcgatactgtagaggacacaaagattctttttgacggcatacctctggagaaaatgagtgtgtccatgacaatgaatggcgcagttatacccgtgctcgccaacttcatagtcacgggcgaagaacagggtgtacccaaagagaaactcaccgggactatacagaatgatatccttaaggagtttatggtgcgcaacacgtacatctttccccctgagccttcgatgaagattatcgcagatatcttcgaatacactgcaaagcacatgccaaagttcaattccatttcaatctccgggtatcatatgcaggaagctggggcagacgccatcctggaattggcctatactttggccgatgggctcgagtattcccggaccgggttgcaagccggcctgaccatcgacgaattcgctccgaggctttccttcttctgggggatcggcatgaatttttacatggagatagccaaaatgcgtgccggtcgccgcctgtgggcccatctgatcgagaagatgttccagcctaaaaatagtaagagtcttctgctgagggcacactgtcagacatctggctggtctctaactgagcaagatccatacaacaacatcgtgcggaccgctatcgaggcgatggcagccgtcttcgggggtacccagagcctgcacaccaattcctttgacgaggctttagggctcccaacagtgaagtcagcccgtatagcacggaacactcagatcatcatccaggaagagtccggaattcctaaggttgccgacccctggggcgggtcctacatgatggaatgcctgaccaatgatgtgtacgatgctgccctgaaactaatcaacgagatagaagaaatgggagggatggccaaagccgtggccgagggtattccaaaactccgaatagaagagtgcgcagccaggcgtcaagcccggattgatagcggctctgaggtaatcgtgggcgtgaataagtaccagttggagaaggaggacgccgtcgaagtcctggctatcgacaacacgtcagtcagaaaccggcaaatcgaaaaactcaagaaaatcaagtcttcgcgggaccaggccctcgcagagcgctgcttagcagcccttaccgagtgtgcagctagtggagatggaaacatcctggctctcgcagtggatgcatcaagggcaagatgtacagttggagaaattaccgacgcactgaaaaaagtattcggcgagcataaagcaaatgacaggatggtgagcggggcttatcggcaagagtttggcgaaagtaaggagatcacctctgccatcaagcgcgtccacaagttcatggagagagagggacgcaggccaagactgctcgttgcaaaaatgggccaggacggccacgatagaggtgcgaaagttatcgccaccggtttcgccgaccttggctttgatgtcgatatcggaccactctttcagacacctagagaggtggcccaacaggccgtggatgctgatgtccacgctgttggcgtttccactctggctgcgggacacaaaaccctggtccctgaactgattaaggagctgaatagcctgggccggcctgatattcttgttatgtgtggtggcgtcattccgccacaggactacgaattcctttttgaagtcggcgtaagcaacgttttcgggcccggaacgcggattcccaaggccgctgtccaggttctggacgacatcgagaaatgtctggagaagaaacagcagagcgtg

SEQ ID NO: 35 - DNA, 2250 bp, Artificial Sequence
  Codon optimized sequence that encodes an MCM polypeptide with the I671V mutation
atgctgagggctaaaaatcagctctttctgttatcaccacactacctcagacaggttaaggagtcgtctggcagccggctcatacagcagaggctgctgcaccaacagcaaccgctgcatccagagtgggctgcattggccaagaagcagctcaagggtaagaaccctgaggatctgatttggcatacaccagagggtatcagcatcaagccgttatactctaagagggatacgatggacctgcctgaggagctgcctggagtcaaaccattcaccagaggcccttaccccactatgtatacattcaggccgtggactataaggcagtacgccggcttcagtacagttgaagaatccaataagttttataaagataatattaaggccggccaacaggggctgtccgtggcctttgatctggctacccataggggatatgactcagacaaccctcgggtccgcggagatgtaggcatggctggcgtcgcaatcgacactgtagaggacaccaagattctcttcgacggtatccctcttgaaaagatgagcgtaagcatgacaatgaacggggcagttattccagtgctggccaacttcatcgtcacaggagaagaacagggagtccctaaagaaaagctgacaggcaccatccagaacgatattcttaaagagttcatggtccgcaacacatatatcttcccacccgaaccttcaatgaaaattatcgcggacatatttgagtatactgccaaacatatgcctaaatttaactccattagcatcagtgggtaccatatgcaggaggcaggagcagacgctattttagaactggcttatacgcttgcagacgggctcgaatacagtaggaccggacttcaggccgggctgaccattgacgaatttgctcctaggctgtctttcttttgggggattgggatgaatttctatatggagatagcgaaaatgcgagcggggcgccggctgtgggcgcatctcatcgaaaagatgttccagccgaagaacagcaagtccttgttgctgagggcgcattgccaaacatccggatggtctctgactgaacaggatccctataacaacatagtgaggaccgccatcgaagccatggctgccgtttttgggggcacacaaagcctccacacaaactcgttcgatgaagctctagggcttcccacagttaagtccgctaggatcgcgcgcaacactcagattataatccaggaggagtccggtattcctaaggtggcagacccgtgggggggctcatatatgatggaatgcctaaccaacgatgtgtacgacgccgcccttaagctgattaatgagattgaagagatgggagggatggctaaggcggtcgcagaaggcatcccaaagctgcggatcgaggagtgcgctgccagaagacaagcccggattgactccggttctgaagtgatcgtgggcgtgaacaaatatcagctagagaaggaggacgctgtggaagtgctcgcgattgacaacacttccgtgagaaacagacagatagaaaaacttaaaaaaataaagtcctcgcgggatcaagccctggccgaacggtgtctcgccgctctcaccgagtgcgcagcttccggcgacggaaacattcttgctctggctgtggatgcgtcaagagcgaggtgcactgtcggggagatcaccgatgcactgaagaaggtgtttggagaacacaaagcaaacgatcgaatggtgagcggagcctaccgacaagaattcggggaatccaaggagataacgtcagctatcaagagagtgcacaaattcatggaacgcgaggggaggcggccgaggctgctggtggccaaaatggggcaggacggccacgaccggggagctaaggtcatcgccacagggtttgccgacctaggcttcgatgtcgacatcggcccccttttccagactccccgggaagttgcacagcaggccgttgacgccgatgttcacgccgtcggagtgtcaaccctagccgccggccacaagaccctggtcccagagctgataaaagagctgaattcactcggccgaccagatatcctggtcatgtgcggcggggtgatccccccccaagactatgaatttctgttcgaggttggcgtttctaatgttttcggcccaggtacacggattcccaaggcggcagtccaagtactcgatgacatcgaaaagtgtcttgaaaagaagcagcagtcagtt

SEQ ID NO: 36 - DNA, 2250 bp, Artificial Sequence
  Codon optimized sequence that encodes an MCM polypeptide with the I671V mutation
atgctacgagccaagaaccagctcttcttgctaagtccgcattacctgaggcaagtgaaggagagcagtggcagccgacttatccagcagagactcctccaccaacagcagcccctccatcccgagtgggcagccctcgcgaagaaacaattaaaaggtaaaaacccggaggatctcatctggcatacacctgaaggcatttctatcaagcctctctactcaaaacgggacactatggacctgcctgaggaactcccaggtgtcaaaccattcacacgtgggccttaccctacaatgtacacctttagaccttggacaattagacagtacgctggattttctactgtagaggaaagtaataaattctataaagataacatcaaggccggtcagcaaggcctgtccgtcgccttcgacctggccacacacaggggctatgacagcgacaacccaagagtgagaggggatgttggcatggctggggtggctattgacactgtggaagacactaagatcttattcgacggcatcccacttgagaaaatgtcggtgtctatgactatgaacggcgctgttatccccgtgctggccaattttatcgtgacaggagaagagcaaggcgtcccgaaagaaaagctcacggggaccatccagaatgatattctcaaggagttcatggttcggaacacttatatctttccaccagaaccatccatgaagatcatcgccgatatttttgagtataccgctaaacatatgcccaaatttaacagcatctctatctcggggtatcatatgcaggaagctggcgcagatgctattctggagttggcgtacactctcgctgacggtctggagtattcaaggaccgggctccaggctggcctgactattgacgaattcgcaccccggctgagctttttctggggtatcggtatgaatttctacatggaaatcgccaagatgagggctgggcgcagactgtgggcacatctgattgagaagatgttccagcctaagaacagcaagtcactcttactgagggcccattgccagacctccggatggtccctaacagaacaggatccctataataatatcgtaagaaccgccatcgaagccatggctgccgtatttggcggtacgcagagcctgcacacaaactcgtttgacgaggccctgggcctaccgaccgtgaaatctgcgcggattgctaggaacacccaaatcattatccaggaggagagtggaatccccaaggtagcagacccctggggtggctcatatatgatggagtgtctgactaatgatgtgtacgatgctgcactcaagttgatcaatgagatcgaagagatgggcggaatggctaaggccgttgcagaagggattcctaaactgcgcatcgaagagtgtgcagccagaagacaggcgcggattgactcgggctcagaagtcatcgtcggagtgaacaaataccagctggagaaggaggacgcggtagaagtcttggcaatcgacaatacgagcgtgcgcaatcggcagatagaaaagctaaagaaaatcaaatcatcaagggaccaggccctggccgagagatgcttggcagcattgactgaatgcgccgcgagcggtgatgggaatatactcgccctggccgtcgatgcatctagagcgcggtgcacagtcggggaaataactgatgctctgaaaaaggtgttcggcgaacacaaagccaatgacagaatggtgtctggcgcctaccgtcaagaattcggagagagcaaggaaattacctccgcaattaagcgcgtacacaagtttatggaaagggaagggcgccggccccgtctgctcgtggctaaaatgggacaagatggtcatgacagaggggctaaggtgattgctactgggttcgcagacctcggcttcgatgtggacatcggcccactatttcaaaccccgcgggaagtagcacaacaggcagtggatgctgacgtacacgctgtgggggtgagtaccctggccgccggccataagacgcttgtcccggagctaatcaaggaacttaactccttgggtcggccagatatattggtgatgtgtggtggtgtgattcccccacaggactatgagtttctgtttgaggtgggagtgagcaatgtctttggacccggtacacgcatccctaaagccgccgtccaggtcttagatgacattgaaaagtgccttgagaagaaacaacagtcggtc

SEQ ID NO: 37 - DNA, 2250 bp, Artificial Sequence
  Codon optimized sequence that encodes an MCM polypeptide with the I671V mutation
atgctcagggcgaaaaaccaactatttttgctctcaccccattacctccgacaggttaaggaaagtagtgggagcagactcatccagcagcggttgctgcaccagcagcagccactgcaccccgagtgggccgcattggccaaaaagcaattgaagggcaaaaaccccgaggacttaatttggcacaccccagaaggaataagcatcaaacctctgtactcaaagcgtgacaccatggatttgcctgaggagctacctggggtgaagcccttcacaagagggccataccctaccatgtatactttcagaccctggactatcagacagtacgccggcttttcgaccgtcgaggagtccaataagttttacaaagataatatcaaggctggtcagcagggtcttagtgtggccttcgatttggctacccaccgggggtacgacagcgacaacccacgcgtccgcggagatgtaggtatggctggagtggctattgataccgtcgaggataccaaaatattgttcgacggtataccgctggaaaagatgagtgtgagcatgacaatgaacggagctgtcatccctgtgctcgccaacttcattgtgacaggcgaggagcaaggtgtgccaaaggaaaaactgacagggacaatacagaacgacatcctgaaagagttcatggtccggaatacctacatctttccacccgaaccttctatgaagattattgccgacattttcgaatacaccgctaagcatatgcccaagtttaattctatctctataagcggctaccacatgcaggaagccggagcggatgccatccttgagttagcctatacattggccgatggcctggaatactcccgaacaggcctacaggcagggctaacaatcgacgaatttgcgcctcgactgtcctttttctgggggatcggcatgaacttctacatggagatcgctaagatgagagccgggcgccgactgtgggctcacctgatcgagaagatgttccagccaaaaaactccaaatctttgctgctgcgcgcccactgccaaacttccggctggtccctgaccgaacaggatccctataacaacatcgtgcgaactgcaattgaagccatggccgcggtgttcgggggcacgcaatctctccataccaatagtttcgacgaagccttgggactcccgactgtcaagtccgccagaatagccagaaatacccaaatcatcatccaggaggaatctggaattcctaaggtggcggatccctggggtgggtcctacatgatggagtgcctgaccaacgacgtgtacgacgccgccctgaagttgattaacgaaattgaagagatgggcggcatggcaaaagccgtagccgaaggcatccccaagttgagaatcgaggaatgtgccgccaggcgccaggcacgcatagatagtggaagtgaggtcattgtcggtgtaaacaagtaccagctggagaaagaggatgcagttgaggtgcttgcgatagacaacacaagcgtgaggaataggcagatcgagaaactgaagaagatcaaatctagccgggatcaggccttagccgaacgctgtctggccgccctgacagagtgcgccgcatctggggacgggaacatcttggccctggcagttgatgccagccgggcccggtgtacggtgggcgagataaccgacgccctgaaaaaggtgtttggggaacataaggcgaatgacaggatggtctcaggggcgtacagacaggaattcggagaaagcaaggagatcacctccgccattaagcgcgtgcataaattcatggagagagaagggcggcggccgagattgctggtagctaagatgggacaggatggacatgatcggggagccaaggtgatagccacaggctttgcagatctgggctttgacgtggacattggccccctgttccagaccccacgtgaagttgcacaacaggccgtcgacgccgatgtccatgccgtcggcgtgagcaccctggcggctggacataaaacattagtccccgagctcatcaaagaactgaattccctcgggcggccagacatcctcgtgatgtgtgggggcgtgatacctcctcaggattatgagtttctgttcgaggtaggtgtctccaatgtcttcggtccagggactcgcattccgaaggctgctgtccaggtccttgacgacattgaaaagtgtctagagaaaaagcaacagtctgtg

SEQ ID NO: 38 - DNA, 2250 bp, Artificial Sequence
  Codon optimized sequence that encodes an MCM polypeptide with the I671V mutation
atgcttcgcgccaaaaaccaactttttctgctgtctccccactacttgcggcaagtaaaggagagcagcggctcccggctgattcaacagcgattactacaccagcagcagcccttgcatccggaatgggcagccttagcaaaaaagcagttaaaagggaagaaccctgaagacctaatctggcatacacctgaaggaatctcgattaagcctctttattccaagcgggacactatggatttgccagaagaactccctggcgtgaagccgttcacgcgcgggccttatcccacgatgtacaccttccggccatggacaatccgacaatatgccggcttcagcacggtggaagagtccaacaagttctacaaggataacatcaaagccggccagcagggactgagcgtggcattcgacctggccactcaccggggatatgactctgataaccctagagtaagaggcgacgtcggcatggcaggcgtcgccatagatactgttgaagacactaagatcttgtttgatgggataccactggagaaaatgtctgtgagtatgaccatgaacggcgccgttattcctgtcctcgctaacttcatagttacaggagaggaacagggcgtccccaaagagaagcttaccggaaccatccagaacgatattcttaaagagtttatggtgcggaatacgtacatttttccccctgaacctagcatgaaaatcatcgcagacatctttgagtatacagctaagcacatgcctaagttcaattctatcagtatttcgggctaccacatgcaggaggctggggcagatgccatcctggagctggcctatactttagctgacggtttagaatactcgcgcactggcctccaggcgggcctcacgatcgacgagttcgccccaaggctctcatttttttggggcattggcatgaacttctacatggagatcgcgaagatgcgggctggccgccgcctgtgggcacatctcatcgagaagatgtttcagcctaaaaatagcaaaagcctccttttgcgggcccactgccaaacatccggatggtcgctgacagaacaggacccatacaacaacatcgtccggacagctatcgaagccatggccgccgtgttcggaggaactcagagcctccacacgaattcatttgacgaggccttggggctccccacagtgaagagcgccagaatcgctcggaacacccagattatcattcaagaggagagcgggatacccaaggtggccgatccgtggggtggcagctacatgatggagtgcctgacaaacgacgtttacgacgccgccctcaagctgataaacgagatcgaggagatggggggtatggcaaaggccgtcgctgaggggattcccaaactgaggatcgaagaatgcgcagctcggcgacaggctcgaattgacagcggttctgaggtgatcgttggagtgaataaatatcagctggagaaggaagacgcagtagaggtcctggccatcgataacacaagtgtgagaaatcgacagatagagaagttgaagaaaattaagtcatctagagaccaggctctcgcagaacggtgtctcgcagcactcacagaatgtgcagcaagtggggacggtaatatcctggccctcgcagttgacgcgtctcgcgctaggtgtaccgtgggcgagatcaccgatgctcttaaaaaagtgttcggggagcacaaagcgaacgataggatggtttccggcgcttacaggcaggaatttggagagagcaaggaaatcacatctgctattaaacgagtgcacaaattcatggagcgggaaggcagaaggccacgcttgctagtcgccaagatgggtcaagatggacatgaccgcggcgccaaggtaatagctaccgggtttgccgatttgggcttcgatgtggacatcgggcctctgttccagacacctagagaggtggcccagcaggctgtcgatgccgatgtccatgcagtaggagtatcgaccctcgcggcggggcataagacactggtgcctgagctgatcaaagagttgaactctctcggaaggccagacatactggtcatgtgcggtggagtcattccaccccaggactacgaatttctgttcgaggtgggcgtttccaatgtctttggccccggcactcgcatccccaaagctgccgtgcaagtcctggatgacatagagaaatgtctggagaagaaacagcaatccgtc

SEQ ID NO: 39 - DNA, 2250 bp, Artificial Sequence
  Codon optimized sequence that encodes an MCM polypeptide with the I671V mutation
atgcttagagcgaagaaccagcttttcctgctgtctccccattatctcagacaagtaaaagagtcttccggtagccggctgatccagcaaaggttattacaccagcaacagccacttcaccccgagtgggcggccttagccaagaagcagctcaaaggcaaaaatcctgaggacctaatttggcacaccccagagggcatctccattaagcctttgtactcgaagcgcgacacaatggatttgcctgaggaattacctggggttaagccttttaccaggggaccctatcccacgatgtacacattccgaccttggacaattcgccaatatgctgggttcagtacagtggaggaaagcaacaagttttacaaagacaacataaaagccggtcaacagggcctgtctgtcgcattcgatcttgccactcaccgcggctacgactctgataacccgagagtccgcggggatgtgggcatggcaggagttgctatcgacacagtcgaagacaccaagattctgtttgacggtataccactggagaagatgtcagtttcaatgactatgaatggcgcggtgatccctgttctagcaaactttatagtgactggggaggagcagggggtgccgaaggaaaagttaactggaactattcagaacgacatccttaaagaattcatggtgcgaaacacgtacatcttccccccggagcccagcatgaagataatcgcagacatctttgaatacaccgcgaagcacatgcccaagttcaactcaattagcatctcagggtaccatatgcaggaagcgggggccgatgccatcctcgaactggcttacacgcttgcggatggcctagagtatagtagaaccggattacaagctggcctcacaatagatgaatttgcccctcgtctcagttttttctggggcatcggaatgaacttttatatggagattgctaagatgcgggcaggccgccgtctctgggcccacctgattgagaaaatgtttcagcccaagaactccaaatcactgctgttaagggcccattgccagaccagcggctggtccctgaccgaacaggacccctacaataatattgtgcgcactgccatcgaggccatggcagcagtgttcggtgggacacagagccttcataccaacagttttgatgaggccctggggttacctaccgtcaagtccgcgcgcatcgcccgcaacacccaaatcattatccaagaagagtccggaatacccaaggtcgcagacccatggggggggtcctacatgatggagtgccttaccaatgacgtgtatgatgctgccctaaaacttattaatgagatcgaagaaatgggaggaatggctaaggcagtcgcggaaggaattcctaaactcagaattgaagaatgtgctgccagacggcaagcacgtatagattctgggtccgaggtaatcgtcggggtcaacaagtaccagcttgaaaaggaggatgctgtggaggtcctggccattgacaacacgagtgtgcggaatcgacagattgagaagctgaagaaaattaagagctcacgagaccaggctctggcggagcgctgcctggcagcactgaccgagtgtgctgcttcaggtgatggtaatatccttgccctagccgtggacgccagtcgcgcccgatgcacagtgggggagattaccgacgccctcaaaaaggttttcggagaacacaaagccaacgatcgcatggtgtcaggagcttaccgacaggagtttggtgagagtaaagaaattacatccgctatcaaacgagtgcataaattcatggagagagagggtagacggcctagactcctggtggccaagatgggacaggacggtcacgatcgtggtgctaaggttatcgccacaggcttcgctgatctgggattcgatgtagatatcggccctctgttccaaactcctcgggaagtggcacaacaggctgtcgatgctgatgtccatgcagttggagtaagcacacttgcagctggacataagacactcgtgcctgagctgatcaaggaactgaacagcctggggaggccggacattttggtcatgtgcgggggggtcatccccccccaggactatgaattcttgtttgaggtgggagtgtcaaacgtcttcggtcccggcacacggatccccaaggctgcagtgcaggtgcttgatgatatcgagaagtgcctcgagaagaagcagcaatccgtt

SEQ ID NO: 40 - DNA, 2250 bp, Artificial Sequence
  Codon optimized sequence that encodes an MCM polypeptide with the I671V mutation
atgctgagggctaaaaaccaattgttccttctgagccctcactatcttcggcaggtcaaagaaagctcaggctcacgcctcattcagcagcggctgctccaccagcagcagccactgcatccagagtgggctgcattagcaaagaagcaactcaaaggcaagaaccctgaagacttaatctggcatacccccgaggggatcagcatcaaacccttatattcaaagcgggatactatggacttgccggaagagttacccggcgtcaaaccctttacgcgcggcccataccctacaatgtacaccttccggccctggaccatccgccagtatgccgggtttagcaccgtcgaggaatctaataagttttataaggataacattaaagctgggcaacaaggactgtcagtcgcttttgatttggccacacatagaggatacgattctgataacccacgggtgaggggtgacgtggggatggccggagtggctatcgataccgttgaggacacaaagatcctttttgacggcattcctctcgagaaaatgtctgtcagtatgaccatgaatggggccgtcatccccgtgcttgccaacttcatagttacgggagaggagcagggagtgccgaaagagaaactgaccgggactatccagaacgacattctgaaggaattcatggtgcggaatacctacatattcccccccgagccaagcatgaagatcattgccgacatcttcgagtatactgctaaacacatgcccaagtttaattccatcagtatcagtggctatcacatgcaggaggcaggagcggacgccatcttggaattggcatacactctggcggatggtctcgagtattcacggactggactgcaggctggcctgaccatcgacgaatttgcgccgcgcttatcgttcttctggggcatcggaatgaatttctatatggaaatcgccaaaatgagggccggtagacgcctgtgggcccatttgattgaaaaaatgttccagcccaagaattccaagtccctattactaagggctcattgtcaaacatctggatggagtttaacggagcaggacccatacaacaatatagtgcgcacagctattgaggcaatggcagccgtgttcggaggcactcaatcactgcatacaaatagtttcgatgaagctctggggctccccaccgtgaagagcgccagaattgcccgaaacacccagatcatcatccaggaagagtctggcatcccaaaggtagctgacccctggggcggcagctacatgatggaatgcctgactaacgatgtctatgacgctgctctgaagctgattaacgaaattgaagagatgggcgggatggccaaagcggtggcagagggcatccctaagctccggattgaggaatgtgctgcacgcagacaggcccggattgactccgggagcgaggttatcgttggtgtaaataaataccaactcgagaaagaggatgccgttgaagtactcgcaatcgacaacacctcagtgcggaataggcagatcgagaagctgaaaaagatcaaaagctctagggaccaggccctggctgagcgttgtctcgcagctttaacagagtgtgccgcttcaggtgatggtaatatccttgcccttgccgttgacgcatcgagagctagatgcacagtgggtgagattactgatgccctaaagaaagtatttggtgagcataaagccaatgataggatggtctccggagcatacagacaggaatttggcgagtcaaaggagattacctcagccatcaaacgcgtccataaattcatggagagagaaggaaggaggccacggttgctagtggcaaagatgggccaggacggccatgataggggagctaaggtcattgcaaccggctttgccgacttgggcttcgacgtggacatcggccctctatttcagactccacgggaggtggcacagcaggctgtggatgcggatgtgcacgccgtgggggtgtctaccctggctgccgggcacaagactctggtgcctgagcttattaaagagttgaacagcctgggccgacccgacatactcgtgatgtgcggcggtgtcataccgcctcaggattatgaatttctgtttgaagtgggcgtgagcaatgtgtttggacctggtacacgcatcccaaaggctgctgtgcaggtgttagatgatatcgaaaagtgtctggaaaaaaagcagcagagcgtc

SEQ ID NO: 41 - DNA, 2250 bp, Artificial Sequence
  Codon optimized sequence that encodes an MCM polypeptide with the I671V mutation
atgctgcgtgcgaaaaaccagcttttcctgttgagtccacactacctgagacaagtcaaagaatcaagcggttccaggttgattcagcagcggttgctccaccagcagcagccactccacccagagtgggcagcactggcaaagaagcagttgaaaggtaaaaaccctgaagacctgatttggcacactcctgaaggcatttcaatcaaacctctgtacagcaagcgcgacacgatggatcttcccgaagaactccccggtgtcaaaccatttactagaggcccctaccctacaatgtatacctttcggccatggactatccgacagtacgctggattttccaccgtcgaggaaagtaacaagttctataaggataacattaaggccggccagcagggactgtcggtagcctttgacctcgcaacccatcggggctacgatagcgataacccaagagtgaggggagatgtgggcatggccggtgtggcgattgatactgtggaagacactaagatactgttcgatgggattcctctcgagaaaatgtcagtctccatgaccatgaacggggctgtcatacccgtgcttgctaactttattgtgacaggcgaagagcagggagtgcctaaggagaaactgaccggcacaattcagaacgacatccttaaggaattcatggttagaaatacgtacatctttcctcccgagcctagtatgaaaattatagcggacatctttgaatatactgccaaacacatgccaaagtttaatagcatatccatatcaggatatcatatgcaggaagcaggtgcggatgctatccttgagctggcatacaccctggctgatggtctcgaatattctagaacgggattacaggccggtctcacaattgatgaatttgcaccaagattaagctttttttggggaattgggatgaatttttacatggaaatagctaaaatgcgcgcgggacgccgcctctgggcccaccttatcgagaaaatgttccagccgaagaatagtaagagtctcctcctgagagcccactgccagactagcggatggagcctgactgaacaggacccctacaataacatcgtccggacagccattgaggccatggcggcagtcttcggtggaactcagtcgctgcacacaaattctttcgatgaagccctcggcctaccaactgtgaaatctgccagaattgccaggaacacccagatcattattcaagaggagagtgggattcctaaggtcgccgacccctggggcgggtcatatatgatggaatgtctcaccaatgacgtgtacgacgccgcactcaagttgataaacgagattgaggagatgggcggcatggctaaggctgtggccgagggcattcctaaactcagaatcgaggagtgtgccgcccggcgacaggcgcgtatagacagcgggagtgaggtcattgttggagtcaacaaatatcaactagagaaggaagacgcggtggaggtgctggctatcgacaatacctcagtgcggaatcggcagatcgagaagctcaagaagattaagtcttcaagggaccaggccctggctgagcgctgcctggctgccctgaccgaatgcgccgccagtggggatgggaacattttggctttagcggtcgacgcttccagggcccgttgtaccgtaggggagattactgatgcattgaaaaaagtgtttggtgaacataaagccaacgatcggatggttagtggggcttataggcaagaatttggagaatccaaggagatcaccagtgccataaaaagagtgcacaaattcatggaacgcgagggccggcggcctcggctcctggttgcaaagatggggcaggacggccatgaccggggggccaaagtgatcgccaccggatttgcggatctcgggtttgacgtggacattggcccgctattccagacgcctcgtgaagtagcacagcaggccgtggacgccgatgtccatgctgtgggagtgtcaacactggctgccgggcacaaaacactggttccagagttgatcaaggaactgaattctcttggtcggcctgatattcttgtaatgtgcggcggagtcatcccaccgcaggactacgagttcctttttgaggtgggggtatcaaacgtgtttggacctggaacgcgcattccaaaggctgccgtgcaggtgcttgatgatatcgaaaagtgcctggaaaaaaagcagcagtccgtg

SEQ ID NO: 42 - DNA, 2250 bp, Artificial Sequence
  Codon optimized sequence that encodes an MCM polypeptide with the I671V mutation
atgcttagagcaaagaatcagttattcctgctgagtccccattacctgcgacaggtgaaggaaagctcaggcagcagactgatccagcagcgcctgctgcaccaacagcagcctctgcatccagagtgggccgctctcgccaagaagcagcttaagggaaaaaaccctgaagatctgatttggcacacacccgaaggtatctcaataaaacccttgtattctaagcgcgatacaatggacttgccagaagaactgcctggagtgaaaccctttacaagggggccctacccaacaatgtatacatttaggccttggacaattagacagtacgcgggttttagcactgtcgaggagtccaacaaattctacaaggataacatcaaagcgggccagcaaggactgtcagtggcatttgacttggccactcatagggggtatgacagtgataaccctcgggtgcgaggtgacgtgggaatggccggggtcgcgatcgatacagtggaagacaccaaaatcctcttcgatgggatacccctggagaagatgtccgtttcgatgacgatgaacggggccgtgatcccagttctcgctaacttcattgtaactggcgaggaacagggagttcccaaagagaaactgaccggcactattcagaacgatatcctaaaggaattcatggtgcggaatacctacattttccctccagagccctctatgaagattatagcagatatcttcgagtataccgccaaacacatgccaaaatttaattccatttccatctctggctaccacatgcaggaggccggcgcagacgccatcctcgagcttgcctacactttggcagatgggttagaatactcacggacaggactacaggctggtctgacaattgatgaattcgcccctcgcctgtcattcttttgggggataggcatgaatttctacatggagatcgccaagatgcgcgccggcagaagactgtgggcacatctcatcgaaaagatgttccagcctaaaaactccaagagcctgttattaagagctcactgccagacctccgggtggagtctgactgagcaggatccttacaacaatatcgtcagaacagcaatcgaggcaatggccgccgtttttggggggacgcagtccttgcatacaaattctttcgatgaagctctcggactgcctaccgtcaaatccgcgagaatcgcgcggaacacccaaatcataattcaggaggaatccggaattcccaaagtggcggacccatggggagggagttacatgatggaatgcctcaccaatgatgtgtatgatgcagcactcaagctgattaatgaaatcgaggaaatgggaggtatggcaaaagctgtcgcagagggcatccccaagctgagaatcgaagaatgcgccgccaggaggcaggccagaattgattctgggagtgaggtgatcgtgggggtgaacaagtaccagcttgagaaggaagacgcagttgaggttctcgccattgataatacctcagtgcgcaaccggcagattgagaaactcaagaagattaagagctccagggaccaggcacttgctgagcgttgcctcgcggcactgacagagtgcgctgcaagcggggatggtaacatcctcgctctggccgtcgacgcaagcagagctcggtgcacggttggagagatcaccgacgccctgaagaaagtgttcggcgagcacaaggccaacgacagaatggtgtcgggggcgtaccgccaggaatttggtgagtccaaggagatcacaagtgccatcaaaagggtgcataaatttatggagagagagggacgacggcctcgccttcttgtggcgaaaatgggacaggatggccacgatcggggtgctaaggtgatcgcgacgggctttgccgaccttggctttgacgtggacattggacccctttttcaaacacctcgagaagtggcacagcaggctgtggatgcagacgtgcatgccgtgggggtctcaacactggctgccggccacaagactctggtccccgagctgattaaagagctgaattccctggggagaccagacatcctcgttatgtgtgggggcgtgattcctcctcaagactacgagttcctctttgaggttggcgtttcaaacgttttcgggcccggcacacggatacctaaagcagctgtccaggtgctagacgatattgagaagtgtcttgaaaagaagcaacagtctgtc

SEQ ID NO: 43 - DNA, 2250 bp, Artificial Sequence
  Codon optimized sequence that encodes an MCM polypeptide with the I671V mutation
atgcttcgcgctaagaatcagttgtttctgctgtcacctcactatctaagacaagtcaaagagtcatccggctctagattaatccaacaacggctgttgcaccagcagcaacctttgcaccctgaatgggccgccttggctaaaaagcagctaaaggggaaaaatccagaagacctgatttggcatacaccagagggtataagtattaagccactgtattctaagcgcgacaccatggacctccccgaggagttaccaggggtgaagcctttcaccagagggccctaccccaccatgtacacctttaggccttggactattcgacagtatgcagggtttagcaccgttgaagagtctaataagttctacaaagacaacatcaaagccgggcagcaaggcctttctgtggctttcgacctggcaacacatcgcggctacgattctgataacccgcgtgtgaggggcgatgttgggatggctggcgtcgctatcgacacggtcgaggacacaaagatcttatttgatggaatccctcttgaaaagatgagtgtcagcatgaccatgaacggcgctgtgatcccagtactggctaactttattgtgacaggggaggaacaaggggtgccgaaagagaaactcacaggaactattcagaacgatatcttaaaagagtttatggtgcggaacacttatattttcccccccgaacctagcatgaaaataattgccgacattttcgagtatactgctaagcatatgcctaaattcaactctattagtatcagcgggtatcacatgcaggaggccggggcggatgccatactggagctggcctacaccctagccgacggactggaatattcacgtactggcctgcaggctggacttaccatcgacgaatttgcaccccgactgagtttcttctggggaatagggatgaatttttatatggagattgctaagatgagagctggacgcaggctctgggcccacctgatcgagaagatgtttcaacctaaaaactccaagagcttgctattgcgagcccactgtcaaacctcagggtggagtctgactgaacaggacccttataacaatattgtgaggaccgccatcgaggcaatggcagctgtattcggcggaacccagagcctgcacacaaactctttcgacgaagctctgggcctgccaaccgtcaaatccgccaggatagccaggaacacccagattattatccaagaagaatctggtatccccaaggtcgccgatccttggggcggctcttacatgatggagtgcttaaccaacgatgtgtacgatgcagctttgaaactcatcaacgaaatcgaagaaatgggggggatggcaaaagcggtcgcagagggtattcccaagctgcggatcgaagagtgtgcggcaagacggcaggcacggattgacagcggttccgaggtgatagtcggcgtgaacaaataccagttagagaaagaagatgctgtcgaggttctggccatcgacaacacaagcgtgcgcaacagacaaatcgaaaaactaaaaaagataaaatcttccagagaccaggctctcgcggagcgctgcctggccgcgttgaccgagtgcgccgcctcgggcgacggaaatatcctggccctggccgtcgacgccagtagggcccggtgtacagtgggagagatcaccgatgcgctgaaaaaagtttttggggagcacaaagccaacgataggatggtgtccggggcgtatcgtcaggagttcggcgagagtaaagaaattacctctgccataaagcgggttcacaaatttatggaaagagaaggcaggaggcctagactgctcgtggccaaaatggggcaggacggccatgacaggggagccaaagttattgccactggctttgccgatttggggtttgatgtcgacataggccccctatttcagacccctagggaagtggctcaacaggccgtggatgccgacgtacacgctgtcggggtgtccaccctcgctgcaggccacaagacattagttcctgaactgatcaaagaactgaattcactaggccgccccgacattctggtgatgtgcggcggtgtgattccacctcaggactatgaattcctctttgaggtgggtgtctctaacgtgttcggaccaggtacccgaattcctaaagccgcagtgcaggtgctcgacgacattgagaagtgtcttgagaagaaacagcagtcagtg

SEQ ID NO: 44 - DNA, 2250 bp, Artificial Sequence
  Codon optimized sequence that encodes an MCM polypeptide with the I671V mutation
atgctgagagctaaaaatcaactgtttcttctgtcgccccattaccttcgtcaggtaaaggagagcagtggttcccggctaattcaacagagactgctgcaccaacagcaacccctgcaccctgagtgggcggccctggccaagaaacaattgaagggcaagaacccggaggacctcatatggcatacaccagagggtatctccatcaagcctctgtacagtaagcgcgatactatggatctgccagaagaactcccaggcgtgaaaccattcacaagagggccctaccccaccatgtacactttcaggccgtggacaataaggcaatatgcagggttttccacagtcgaggagagtaataagttctacaaggataatattaaagctggtcagcaggggctgtctgtggccttcgatttagctacgcatcggggatacgattctgataacccccgggtccggggcgacgtgggcatggccggggtggctatcgacactgtcgaagataccaaaatcttgttcgacgggattccactagaaaaaatgagcgtcagcatgacgatgaacggcgccgtcataccagtgctcgccaattttatcgtcactggtgaggaacagggggtcccaaaggagaaacttactgggacaatccagaatgacattttaaaggaatttatggtgcgtaacacctatatcttcccaccagagccatctatgaaaataatcgctgacatcttcgaatataccgccaagcatatgcccaagttcaacagtatttcaattagcggctatcacatgcaggaagcaggggccgatgccatactggaactcgcttatacccttgctgacgggctggaatacagtagaactggtctgcaggcaggcctcacaatcgatgaattcgcaccacgtctgtcatttttctggggcattggcatgaatttctacatggagatcgctaaaatgagggcagggcggagactgtgggcccatctgatcgagaaaatgtttcagccaaagaactccaaaagtttgctgctgcgcgcgcactgtcagacgagtggatggtccttgaccgagcaggacccctataataacatcgtgcgtacggctattgaagccatggcggccgtgtttggcggcacccaaagcctgcacactaatagtttcgatgaagccctgggcctgcccaccgtaaaaagcgcccgaatcgcccggaacacacagattatcatccaggaggaaagtggaatccctaaagtggcagatccatggggcggcagctacatgatggaatgcctgacaaacgacgtgtatgacgctgccttaaagctcatcaatgagatcgaggagatgggaggcatggctaaagccgtggctgagggcatccctaagctgcggattgaagagtgtgccgcgcggcgacaggccaggattgatagcggaagtgaagttatcgtgggtgtgaacaaatatcagcttgagaaagaggacgccgtagaggtcctggccatcgacaataccagtgtgcgcaataggcaaattgagaaactgaagaagattaagtctagcagggatcaggccctggccgagcggtgcctggctgccctcaccgagtgcgcagcgagcggagatggtaatatactggctctggcggtggatgcctcgcgggcacgatgtacggtgggcgagatcacagatgcccttaaaaaggtgtttggcgaacataaagccaatgatagaatggtgtctggagcatatcgtcaggaattcggtgaaagcaaagagatcacaagtgcgatcaaacgagtgcataaatttatggaaagagaagggcgcagaccacgtctgctggtggctaaaatggggcaggatggccacgatcgaggagcaaaagttatcgccacaggttttgccgacctggggtttgatgtagacataggccccttgtttcagacacctagggaggtggcgcagcaggccgttgacgccgatgtgcatgctgtgggagtgtccacactcgcggccggccataagacgctcgtgcccgaactgattaaagagttgaacagcctggggaggccagacattctcgtgatgtgtggaggcgtgattcccccacaggattatgagtttctttttgaggtcggcgtgtctaatgtgttcggtcctggtacccggattcccaaggcagctgtgcaggtcctagacgatatcgaaaagtgcctggagaagaagcaacaaagcgtt

SEQ ID NO: 45 - DNA, 2250 bp, Artificial Sequence
  Codon optimized sequence that encodes an MCM polypeptide with the I671V mutation
atgttacgagccaagaaccagctgtttctgctttctccgcactacctcaggcaggtgaaggagagtagcggaagcagactgatacagcagagactcttacaccagcaacagcctctccaccctgaatgggccgccctcgcaaagaaacagctgaagggaaaaaatccagaggacctgatttggcacactcctgaagggatcagcattaaaccgttgtacagcaaacgtgacaccatggatttgccagaggaactgcctggagttaaaccttttacacgcggcccataccctactatgtatacgttcagaccatggacaatcagacagtatgccggtttctcaaccgtggaggagtccaacaagttctataaggataacataaaggccggacagcagggtttgtctgtagctttcgatctggctactcacagaggttatgacagcgacaatccacgcgttcgcggggacgtgggcatggctggggtcgcaatagataccgtcgaggatacaaagattctcttcgacgggatccctctggagaagatgtcagtgtccatgaccatgaacggtgctgttatccctgttcttgctaatttcattgtaaccggcgaagaacagggcgttccaaaggagaaactgaccggaactatccagaacgatatcctcaaagagttcatggtcaggaacacttacatcttcccgcctgaaccttctatgaagattattgccgatattttcgagtacactgcaaagcatatgcctaagttcaacagtatcagcatatccggctaccatatgcaagaggccggcgccgacgcaattctcgaactggcttacactttggctgacggcttagagtacagcaggactggtctccaagccgggctgacgattgatgaatttgcccctcggcttagttttttctggggcatcggcatgaatttctacatggagatagccaagatgagggccggcaggcggttgtgggcacatctcatcgagaaaatgttccaacccaagaatagcaagtccctcctacttcgagcccattgccaaacgagtggctggtcattaaccgagcaagatccttataataatatcgtgaggacagccattgaggcaatggcagcggtcttcggtggaacacagagtctgcacacgaacagctttgatgaagcccttggactgcctacggtcaaaagcgccaggatcgctcggaacacacagatcattatccaagaggaatctggcatccccaaggtggctgatccctggggaggctcttacatgatggaatgcctcacaaacgacgtctacgacgccgccctgaagttgatcaacgagatcgaggaaatgggggggatggctaaggcagtagccgagggaattcctaagcttagaatagaggaatgcgctgcccgacgccaggctcggatagacagtggttccgaggtcatcgtgggcgtgaacaaataccaactcgagaaggaggacgccgtcgaggttctggccatcgacaacacgtcagttcgtaaccgacaaatcgaaaaattaaaaaaaataaaatctagcagggaccaggctctggccgagcgttgccttgccgcactgactgagtgtgcagcctcaggcgacggaaacatactggcgcttgcagttgatgccagccgggctagatgtaccgttggggagatcacggacgctctcaaaaaagtgttcggcgagcacaaggcgaatgatcgaatggtgtccggcgcctatcgtcaggagtttggcgagtccaaggaaattacctcagcaatcaagagagttcacaaatttatggagcgcgaagggcgccggcctcggttgctcgtcgctaagatgggacaggacggccatgaccgtggcgccaaggtgattgcgactggctttgcagatctaggcttcgacgtagatataggcccactgttccagacgccccgagaagtggcgcagcaggccgtggacgccgacgtccacgctgtcggagtgagtaccttggcagccggccacaaaacactggtgccagagcttattaaggagctaaattccctggggcggccagacatcctcgttatgtgtggaggggtgataccgccccaagactatgagttcctgttcgaggtgggggtgagtaatgtcttcggccccggcacacgaattcccaaagcagcagtgcaagtgctggacgacattgagaaatgccttgagaagaagcaacagagcgtg

SEQ ID NO: 46 - DNA, 2250 bp, Artificial Sequence
  Codon optimized sequence that encodes an MCM polypeptide with the I671V mutation
atgctacgggctaaaaaccagttgtttctcctatccccccattatcttcgtcaagtcaaagagtccagcgggtccagactgattcagcaaaggctgctgcaccaacagcagcctttgcacccagaatgggctgcacttgctaagaagcagttgaagggcaaaaatcctgaagacctaatttggcataccccagaaggaatcagcatcaagccgctatattccaagcgagataccatggacctcccagaggagctacccggtgttaagccttttacccggggaccttatccgacaatgtacacctttcgaccttggacaatcaggcagtacgccggattttccactgtggaagagagcaataagttctacaaggacaacatcaaagccggccagcaggggctgtccgtggcattcgatttggcaacacaccgcggctacgatagcgataatcctagagtgcgcggcgatgtggggatggcaggcgtcgcgatagataccgttgaggataccaaaatcctgttcgacggcatccctctggagaaaatgtcggtctctatgacaatgaatggagccgtgatccctgtgctcgcgaactttatagtcacgggcgaggaacagggagttccaaaggaaaaactgacagggactatccagaacgatatcttaaaagagttcatggtgcggaacacctatatattcccacctgagccctccatgaagatcattgccgacatctttgagtataccgctaagcacatgccgaagttcaattctatttcaatctccggttaccatatgcaggaggccggagcggatgctatcctagaactggcatacacattggcggacggcctagaatattctagaaccggtctgcaggcagggctcaccatcgatgaattcgccccgcggctgagtttcttctggggcattggaatgaatttctacatggaaattgccaagatgcgtgcaggtcggcgcctgtgggcccatttgatcgaaaaaatgtttcagccaaagaacagcaagtctctgctgctgagagctcactgccaaacttccggatggtccctcaccgagcaggatccctacaacaatatcgtgcggaccgccatcgaggcaatggctgccgtgttcggcggcacccaatctcttcacaccaatagttttgatgaagccttaggactgccaaccgtcaaatccgcacggatcgctcgaaatacacaaatcataattcaggaggagagtgggatccctaaggtcgcagatccctggggcggtagttacatgatggagtgcttgaccaatgacgtctacgacgccgcactcaaactgatcaacgagatcgaggagatgggcgggatggccaaagcagtcgctgaggggatccctaaactccgtattgaagagtgtgcagcccgccggcaagctcggatcgattctggctcagaagtcatcgttggcgttaacaagtaccagctagaaaaagaagatgcagtagaggtgctcgccatagacaatacctccgtgcgcaaccgccaaattgagaaattgaagaagatcaagtcttctcgcgaccaggccttggccgaaaggtgcttagctgcattaactgaatgtgctgcatcaggggatggtaatatactcgctctggcagtcgacgcgtcccgtgccaggtgcacagtgggggaaattactgacgcactgaaaaaagtgtttggtgagcacaaggccaacgataggatggtctctggtgcttatcggcaggagtttggggagtctaaagagataacttctgctattaagcgcgtgcataagttcatggagcgcgaaggacggcgtccccgactgctggtggccaaaatgggacaagacggccatgacaggggggccaaagtgatagcaaccgggttcgcagatctgggcttcgacgtcgatatcggaccacttttccagacacctagggaggtcgctcaacaagcagtcgatgccgacgtccatgcggtgggcgtgtccaccctggctgccggacacaaaaccctggtgccagaattgattaaggagctaaactctctgggccggccagacatcctggtgatgtgtggcggagtgattcctcctcaggattatgagtttctgttcgaggtcggggtatctaatgtgtttgggcccgggactcgcatcccaaaagcggctgtccaggtgttggacgacatagagaagtgccttgagaaaaagcagcagagcgtg

SEQ ID NO: 47 - DNA, 2250 bp, Artificial Sequence
  Codon optimized sequence that encodes an MCM polypeptide with the I671V mutation
atgctgcgggcaaagaaccagctgtttctcctaagccctcattacctccgccaggttaaggagtctagtggctctaggctgattcagcaacgcctactgcaccagcaacaacccctgcaccccgaatgggcggccctggcaaaaaagcagctcaagggcaagaatccagaggatctgatctggcacacacccgaaggcatctccatcaagccgctctatagcaaaagagacactatggaccttccggaagagctacccggagttaaacccttcaccagaggaccttaccccaccatgtacacatttaggccatggaccatccgtcagtacgccggattctctaccgtggaggagtcgaataagttctacaaggataacatcaaggccgggcagcaaggcctctctgtcgcttttgatctggccacacatcgggggtacgacagcgacaacccacgcgtgaggggagatgtaggaatggctggcgtggcgattgacaccgttgaggacactaaaatcctcttcgatggcatacccctggagaaaatgagcgtgtcgatgactatgaatggtgccgtcatcccggtcctggctaatttcatcgtgaccggggaggaacagggcgtgcctaaggaaaaattaaccggcactatccagaatgatattctgaaggagttcatggtcaggaatacctatatttttcccccggaaccatcgatgaagatcattgccgacatcttcgagtacacagcaaagcacatgccaaagttcaacagcataagcatctccggataccatatgcaggaggccggagctgacgctatccttgagctggcatacacgttggcggatggtctggagtattccagaacaggcttgcaggccggcctgacgatcgacgagtttgcacctcggctgtccttcttttggggtattggtatgaacttttacatggagattgcaaagatgcgagcaggtaggcgcctttgggcccaccttatcgaaaaaatgttccagcccaagaacagcaagagcctactgcttagagctcactgtcagacgtccggatggtctttgacggaacaggatccttacaataacattgtccggactgctatagaggcaatggcagccgtgttcggagggacacagagcctccacaccaactcattcgacgaggcacttggcctccccacggtcaaatccgcccgtatagccagaaatacacagattattattcaggaagaatcaggcatccctaaagtggccgacccttgggggggcagttatatgatggagtgcctgacaaacgacgtgtacgacgccgcactcaagctgattaatgagattgaggagatgggcgggatggctaaggctgttgctgaaggcatccctaagctacgcatcgaggaatgtgccgcgagacggcaagctagaattgatagcgggtctgaggttattgtcggcgtgaacaaataccagttggaaaaagaggatgcggtcgaggttctggctatcgacaatacctcagttaggaaccgccaaatcgaaaagcttaagaaaatcaagtccagccgggaccaggcattagcagaaagatgcctagccgctctcactgaatgcgcagcgtctggagacggtaacatcctagccttggcagtcgacgcctcgagagccagatgcactgttggcgaaataactgacgcgctgaaaaaggtctttggcgagcataaggcaaatgatcgaatggtgtcaggagcttacagacaagagttcggtgaaagcaaggagatcacttccgcaatcaagagagtgcacaaatttatggagagagagggccgtcggcctcgcctgctggtggctaaaatgggacaagatggccacgatcgaggggccaaggtaatcgcaaccggctttgccgacctcggcttcgatgtggatataggccctctcttccagacacctagggaagtggcccagcaagccgtggacgccgatgttcacgccgtgggagtttccacccttgcagctggacacaaaactcttgtgcccgagctcattaaggagttgaacagtctcggacgcccagatatcctggtaatgtgtgggggcgtcatcccccctcaggactatgagttcctgtttgaagtcggagtgtcaaacgtctttggccccggaacaaggatcccgaaggctgctgtgcaggtcttagacgacatcgagaagtgcctggaaaaaaaacagcaatccgtg

SEQ ID NO: 48 - DNA, 2250 bp, Artificial Sequence
  Codon optimized sequence that encodes an MCM polypeptide with the I671V mutation
atgctacgcgccaaaaaccagctgttcctgctgtcaccacactacctcaggcaagtgaaagaaagctccggctctcggctcatccaacagcgtctgctacaccagcagcagccactgcacccagaatgggctgccctcgccaagaagcagctgaaggggaagaatccagaggatttgatttggcacacgccggaagggatatccatcaagcccctttacagcaaacgagataccatggacttacctgaagagttgcccggtgtaaagccttttactagaggcccctatcccaccatgtacacgttccggccatggacaataaggcagtacgccggcttttccacagtggaggagtctaataagttctacaaggacaatattaaggccggtcagcaagggctctcagttgcctttgatctggccacccacagagggtacgacagcgataatccacgtgttagaggcgacgtcgggatggccggcgtcgccattgacaccgtcgaggataccaaaatcttattcgacggtattcccctggaaaaaatgagcgtgtcaatgacgatgaatggggccgtcattcctgttttagcaaatttcattgtgactggggaggagcagggggtgcctaaggagaagctcacaggtaccattcagaacgacatactgaaagagtttatggtgaggaacacctacatctttccccccgaaccttccatgaagatcatcgcggacattttcgagtacacagcaaaacacatgccgaagttcaactccatttctatctctggttatcatatgcaggaagccggcgctgacgctatcctggaactggcatatacactcgcagacgggctggagtatagcaggactggcctgcaggccggactgaccatcgacgaattcgcacccagactgagctttttttggggtattggaatgaacttttacatggaaattgcaaaaatgagggcagggcgtcgtctgtgggcccatctcatcgagaagatgtttcagcccaagaatagcaagtctctgttgctacgcgcacactgtcagacatccggttggtcgctgaccgagcaggatccatacaacaatattgtcagaaccgccatcgaagcaatggcagccgtatttggaggaacacagtctctccataccaacagcttcgatgaggcattgggtctgcccacagtgaagtctgccagaattgctcgtaacacacagattattatacaagaggagtccggtattccaaaagtggccgacccatggggggggagctatatgatggagtgcttgaccaatgatgtgtacgacgccgcgctgaaactaatcaacgagattgaagagatgggcggtatggctaaagccgtcgcagaagggatacctaaacttcgaatcgaagaatgtgccgcccgtagacaagctcgcatcgacagtgggagcgaggtgattgtcggcgttaacaagtaccagcttgagaaggaggacgcagttgaggtccttgcaatcgacaacactagcgtaagaaatcgtcagatcgaaaaattaaaaaaaatcaaatcaagccgcgaccaggcactggcggaacgctgcctggccgctctgactgaatgcgcagcatccggcgacggtaatattttagcactcgccgtggacgcgtctcgtgcacgctgcactgtcggagagattacagacgccctgaagaaagtttttggagagcacaaggctaacgaccgaatggtttcaggggcctaccgccaggaatttggggagtcaaaagagataacctctgccataaagagagtccataaattcatggaaagagagggccgtcgacccagacttctcgtcgctaaaatgggtcaggacggacatgacaggggagccaaggtcatcgcaaccggattcgccgatctcggctttgacgtcgacattggcccgctctttcagacaccccgagaggtggcacagcaggcggttgatgcagacgtacacgccgtcggggtctccacactagccgccggacataaaactctggttcctgaacttatcaaggagcttaatagtctcgggaggccggacatcttggttatgtgtgggggcgtgatacccccacaagactatgagttcctctttgaggttggggtatcaaatgtgtttgggccaggcaccagaattccaaaggccgcagttcaggtactcgatgacatcgagaagtgcttggagaaaaagcagcagtccgtc

SEQ ID NO: 49 - DNA, 2250 bp, Artificial Sequence
  Codon optimized sequence that encodes an MCM polypeptide with the I671V mutation
atgctgcgcgccaagaaccagctttttctgctgtcgccccactatcttaggcaagtgaaggaatctagcggcagcaggctcatccaacagcggcttctgcaccaacagcaaccgctgcatcctgaatgggctgccctggctaagaaacaacttaaaggaaagaatcccgaggatttgatttggcatacgcccgagggcatttctatcaagcctctgtattccaaacgagacactatggacctaccagaggagcttcctggcgttaagccctttacccgaggaccctacccgaccatgtatactttcaggccatggaccattcggcagtacgccgggttctccacagttgaggagtctaacaagttctataaagataatattaaagctggccagcaagggctcagcgtcgcttttgatctggctacacacagagggtatgattcagacaatcctcgggttcggggagatgtcgggatggccggggtggctatcgacacagtagaagatacaaaaatcctctttgatggcattcctctcgaaaaaatgtccgtatctatgactatgaacggggccgtgatccccgtgctggcaaatttcatcgttacaggcgaagaacagggcgtgcctaaggagaagttgacaggcacgattcagaatgatatattgaaggaattcatggtgagaaacacatacatcttcccacccgaacccagtatgaagattatcgctgatatttttgaatacaccgctaaacacatgcccaaattcaatagcatttctatatccggctaccatatgcaggaggccggggctgatgccattctagagctggcatacaccctggctgatggactggaatacagccggacaggactccaagcaggtctgacaatagacgagttcgctccccgcttgagtttcttctggggaataggaatgaacttctatatggagatcgctaaaatgcgtgcaggaagaagactttgggcccatctaatcgaaaaaatgtttcagccgaagaatagcaagtccctcctgctgcgcgcacactgccagacttctggttggagcctgacagagcaagatccttacaacaatatcgtgagaaccgctattgaggctatggcagcggttttcggaggcactcaatcactacacacaaactctttcgacgaggccctgggtctcccgaccgtgaagtcagcccgcattgccaggaacacacagatcattattcaggaagagagtggcatcccaaaggtggcggatccttggggtggatcatacatgatggagtgtctaaccaatgatgtgtacgacgctgcgttgaaacttattaatgaaatcgaggagatgggaggcatggctaaggccgtcgccgaggggattcccaagctgcgaatcgaggaatgcgctgctcgacgccaagcccggatcgacagcgggagcgaagtgatcgtgggagtgaacaagtatcaactggagaaggaggatgctgtggaagtcttagcgatcgacaatactagcgtgaggaatcggcaaatcgaaaaactgaaaaagattaagtcttctcgcgaccaggccctcgctgaaaggtgtctggcagctctgactgagtgtgccgctagcggggacggaaatattctcgccctggccgtagatgcctcccgggcgcggtgcacggtcggcgagatcactgacgctctgaaaaaagtgttcggcgagcataaagccaatgaccgaatggttagcggtgcttatcgccaagaattcggggagagtaaggaaataacctccgctattaagcgggtgcacaagttcatggaacgggagggcaggcggcctcggctcttggtggcaaaaatgggacaagatggtcacgacaggggcgccaaagtaatagcaactggatttgctgatctcggctttgatgtcgacatcggtccactgttccagaccccacgggaggtggctcagcaggccgtggacgctgacgttcacgccgtgggagtgtctaccctcgccgcaggacacaagacactggttccggaattaatcaaagagctgaactcgctcggacgccctgacatcctggtcatgtgtggcggcgtgattcccccgcaggattacgaattcttgttcgaagttggagtgtccaatgtcttcggccccggcactcggattccgaaggcggctgtgcaggttctcgacgacatcgaaaaatgtctcgaaaagaaacagcagtcagtc

SEQ ID NO: 50 - DNA, 2250 bp, Artificial Sequence
  Codon optimized sequence that encodes an MCM polypeptide with the I671V mutation
atgttacgggctaaaaaccagttatttttgttatctcctcattacctgaggcaggtgaaagagagcagcggcagcaggctgatacagcagaggttactgcatcagcagcagcccttgcaccctgaatgggcagccttagccaagaaacagctgaagggcaaaaatcccgaagatttgatatggcatactcccgagggaatctccattaagccactgtacagcaagagagatacaatggacctgcccgaggagctcccaggcgtgaagccttttacgagggggccatacccgaccatgtatacgtttcgaccctggactattcggcagtatgcaggattttccaccgttgaggaatccaataaattctacaaagataacatcaaagctggacagcagggcctcagcgtggcttttgatctggcaacccacagaggatacgactcagataatcccagagtgaggggcgacgtgggcatggctggagtcgcaatagacacagtggaagatacaaagatcctgtttgacggtattccactagagaagatgtccgtgtcaatgacaatgaatggtgccgtgatccctgtcctggctaactttatcgtgacgggagaagaacagggggtccccaaagaaaagcttaccgggacaatccagaacgatatcctcaaggaatttatggttcggaacacatacatcttccccccagagccttcaatgaaaattatcgccgatatttttgagtacactgctaagcatatgccaaaattcaattccataagcatttccgggtaccacatgcaggaagccggcgccgacgccatcttggagctggcatatactctggcagatgggctcgaatactccagaaccggactgcaggccggcctcaccatcgacgagttcgcccctaggctctctttcttttggggcatcggaatgaatttctacatggagatcgccaagatgcgggccgggcggcgcctctgggcgcatcttatcgagaagatgtttcagcccaagaattccaagtctctgctccttagagcccattgccaaactagcggctggtccctcacagagcaggacccatataacaatattgtgagaacagcaatcgaagctatggcggctgttttcggcggaacccagagcctgcatacgaattcgttcgacgaagccctaggcctcccaacagtcaagagcgctaggattgccaggaacacccagattataatccaagaggagtccggcattccaaaagtcgctgatccttggggtggatcatatatgatggaatgccttacgaacgacgtgtatgacgccgccctcaagctgatcaacgaaatagaagagatgggcgggatggctaaggccgtggcagaaggcatccccaagttacggatcgaggagtgcgcagcccgtagacaagccagaatcgactctggctccgaagtcattgtcggggtaaacaagtatcagctggaaaaggaagatgcggttgaggtcctggccatagacaacacctccgtgcgaaacagacaaatcgaaaagcttaagaaaatcaagagcagtcgcgatcaggccctggccgaaaggtgcctggcagcccttaccgagtgtgcagcctccggggacggcaatatactggcactggcagtggatgccagtcgcgcacggtgcacagtcggagagatcactgacgcgttgaaaaaagtgttcggggagcataaagctaacgacaggatggtctccggtgcttataggcaggaatttggtgagagtaaagaaataacatccgccattaaaagagttcacaagttcatggaacgggagggaaggcgcccacgactcctagtggccaaaatgggtcaggacgggcatgatcggggcgccaaggtcatcgcaacaggcttcgcagacctgggcttcgatgtggatattggaccgcttttccagacccccagagaggtagcacagcaagcggtggatgccgacgtgcacgctgttggagtatccaccctagccgcgggtcataagaccctggttcctgaactgattaaggagttgaacagcctcgggcgccctgacattctagtgatgtgcggaggcgtgatccctccacaggactatgagttcctgtttgaggtgggggtctccaatgtgttcggtcctggaacccggattcctaaagcagcagtgcaggtgctcgatgatattgaaaagtgtttggagaaaaagcagcagagcgtt

SEQ ID NO: 51 - DNA, 2250 bp, Artificial Sequence
  Codon optimized sequence that encodes an MCM polypeptide with the I671V mutation
atgctgagagcaaagaaccagcttttcttgctctctcctcattacctgcgccaggtgaaggaaagctccggcagcaggctgatccagcagcgtctactgcatcagcagcaacccctgcatcctgaatgggctgctctggcaaaaaagcagctgaagggtaagaatcccgaagaccttatctggcacacccccgaagggatcagcatcaagccgttgtacagcaagcgcgacactatggatctgcccgaggaactgcctggcgtgaagccttttacccggggcccataccctaccatgtacaccttccgcccctggactattagacagtacgcaggtttttccacggtggaggagagtaacaagttctacaaagataacattaaggcagggcagcagggactgagcgtggccttcgatctcgcaacccatcggggatatgactccgataacccaagggttcggggtgatgtgggtatggccggcgtagctatcgatacagtggaagacacaaaaatactgtttgatgggatcccgctggagaagatgtcagtctcaatgacaatgaacggtgccgtgatccctgtgctcgccaacttcatcgtgactggcgaggagcaaggtgtccctaaggaaaagctcaccggcaccatccagaatgacattcttaaagaattcatggtgagaaatacatacatcttcccccctgaaccatccatgaagattatcgctgatatctttgaatacaccgcgaagcacatgcccaagttcaattctattagtatttctggatatcacatgcaggaggctggggctgatgccatattggagctggcatacactctggccgatggcttagaatacagcagaacgggtctccaagccgggctgacgatcgacgaatttgccccaagactcagttttttctgggggatcggcatgaacttttacatggaaatcgccaagatgcgtgcagggaggcgtctatgggcgcatctgatcgaaaaaatgtttcagccgaaaaatagtaaatccctgctgctcagagcccactgccaaacaagcggctggtctcttacagagcaggatccttacaataatattgtgagaacggctattgaggctatggccgctgtgttcgggggtactcaaagccttcacaccaactcctttgatgaggccctgggactgcccaccgtcaagtctgcccggatcgctcggaacacccagatcatcatacaagaggagtctggtattcccaaggtcgctgatccttggggcggcagctatatgatggaatgtctaactaacgatgtgtacgatgcagccctcaagctgatcaatgagatagaagaaatgggagggatggctaaagctgtggcggagggaatacctaaattaagaatcgaagagtgcgcagcccgtagacaggcacgtatcgactccggtagcgaggttatcgtcggtgttaataagtaccagctggaaaaggaggacgcggttgaagtgttggctatagacaatacgtccgtgcgaaaccgccagatagagaaattaaagaagattaagtcatccagagaccaggcccttgccgagcggtgcctagctgctctgactgagtgcgctgccagtggggacggaaatatactggccctcgctgtggatgctagccgcgctcggtgcacagtaggagagatcactgacgcactgaagaaagtctttggcgagcacaaggctaatgaccgtatggtaagtggggcctacaggcaggagttcggcgagagtaaggaaattacatctgcgattaaaagagtgcataaattcatggagagagaagggcggaggcctaggctgctcgtggctaagatgggtcaggatggccatgacaggggtgcaaaagtgattgccacggggtttgcagacctggggtttgacgttgacataggtcctttgttccaaacacctcgcgaagttgcccagcaggctgtggacgccgacgtccatgcagtgggggttagcacccttgccgcagggcacaagacccttgtccctgagttgatcaaagaactgaatagtctgggaaggcctgacatcctggtgatgtgcggaggcgtgatccctccacaggactacgaattcctgttcgaagtgggagtaagtaatgtctttggccccggaactcgaatcccgaaagccgccgtgcaggtgctggatgacattgaaaagtgcctggagaagaagcagcagtctgtc

SEQ ID NO: 52 - DNA, 2250 bp, Artificial Sequence
  Codon optimized sequence that encodes an MCM polypeptide with the I671V mutation
atgctgagagctaaaaaccagctcttcctcctgtcaccccattacttgcgtcaggtgaaagagtccagcgggtcccgactgatccagcagcggttactgcaccagcaacagccactgcacccagagtgggctgcccttgcaaaaaagcagcttaagggcaagaaccccgaagaccttatatggcacacacctgaggggatttctatcaagcctttgtatagcaaaagagatactatggacctgccagaagagcttccaggcgtgaagcccttcacccggggcccctatcccacaatgtacaccttccggccatggacaattcgacagtatgccgggtttagcaccgtcgaggaatccaacaaattctataaagataatatcaaagctggccagcaaggcctgtctgtcgccttcgaccttgccactcacagagggtatgattctgataaccctcgtgtgcgtggggacgtgggcatggccggagtcgcaatcgacactgtagaagataccaagattctcttcgatggtatcccattggagaagatgagcgtctctatgaccatgaatggcgcagtgataccggttttagcaaacttcatcgtgacaggcgaggagcagggcgttcccaaggaaaagctcaccggtactatccagaacgacatccttaaggaatttatggtgcgaaacacctacatctttcctcctgaaccatccatgaaaatcatcgcagatatcttcgaatacactgcaaaacacatgcccaaattcaatagcatctctatatctggctatcacatgcaggaagccggggccgacgccatactggagttggcctataccctggccgacgggctcgaatacagccggacaggattacaggccggcctcaccatcgacgagttcgccccaaggctctcttttttttgggggatcggtatgaacttctacatggagatcgcaaagatgcgcgcagggcgtagactgtgggcacacctcattgaaaagatgtttcagccaaaaaattcaaaaagcctcctactacgggctcactgtcagaccagcgggtggtctctgacggagcaggatccttataacaatatagttagaacggccatcgaagcaatggccgctgtcttcggagggacacaatctttgcatactaatagcttcgacgaggccctcggactgcccacagtgaagtcagccaggatcgcgcgaaacacacagattatcatccaggaagaaagcggaatcccgaaggtggccgatccctgggggggcagctacatgatggaatgcctgacaaatgatgtgtacgacgctgcgttgaagctaatcaatgagatcgaagagatgggcgggatggcaaaggccgtggccgaaggcattccaaagttacggatcgaggaatgtgccgcacgcaggcaagctcgtatagacagcggctctgaggtcattgtgggagtcaacaagtatcaactggagaaggaggatgccgttgaggtcctggcaatcgacaatacaagcgtcagaaacagacaaattgaaaaactgaagaagatcaagagctccagagatcaggcgctggcagagcgatgtcttgcagccttaactgaatgcgctgcctctggcgacggtaatattctcgccctcgcggtcgatgccagcagagctaggtgtaccgtgggagaaattactgacgctctgaagaaggtgtttggagaacataaggctaatgatcggatggtttcaggagcctatcgtcaggaattcggagaaagtaaggagattacgagtgctattaaacgggtacataagtttatggagagagaaggaagacgtccgagattgctggtagccaagatggggcaggatggtcatgatcggggcgctaaagtcattgctactggctttgccgatctggggttcgatgtcgacattggaccactctttcaaactcccagggaggtagcgcagcaggccgttgatgcagatgtgcacgccgtgggcgtgtctactctggccgccgggcataagactctggtaccagaactcatcaaggagcttaacagcctaggacggccagacatcttagtgatgtgtggcggcgttatcccccctcaggactacgaatttctgttcgaagtgggagtgagcaatgtgttcgggcctggcactcgaatcccaaaggctgcggtccaggtcttggacgacatcgaaaagtgcctggagaaaaagcaacagtccgta

SEQ ID NO: 53 - DNA, 2250 bp, Artificial Sequence
  Codon optimized sequence that encodes an MCM polypeptide with the I671V mutation
atgttgagggcaaagaaccaactgttcctgctgtcgccccactacctcagacaggtcaaggagtcatctgggtccaggctgatacagcagaggctgctccaccagcagcagcctttacaccctgagtgggctgcacttgctaaaaagcaactgaagggtaagaatccggaagatctgatttggcacactccagagggcatatctatcaaaccactctattccaaacgggacacgatggacctgccggaagagctgcccggcgtcaaacccttcacccgaggaccatacccgacaatgtacacatttaggccctggacaatccgccaatacgctggatttagcactgtggaggagagcaacaaattttacaaagacaacattaaagcgggccaacaaggtctttctgtggcatttgatctcgctactcataggggctatgactcagataacccacgagtaaggggggacgttggaatggccggcgtggcaatcgataccgttgaagatactaaaatactgtttgatggtattccactggagaaaatgagcgtgtccatgacgatgaacggtgccgtgatccccgtgctagccaactttatcgttacgggcgaagaacagggagttcccaaggagaaattaactggtactatccaaaacgacattctgaaggagtttatggtccgcaatacttacatctttcctcctgagccaagcatgaagataatagccgacatcttcgagtatactgcaaagcatatgccaaagttcaattccattagtatctcaggctaccacatgcaagaggcaggtgcagatgctattttggaactggcttatacgctggcagatgggctggaatacagcagaacgggcttgcaggccggcctgaccatcgacgaatttgcgccccgcttgagctttttctgggggattggaatgaacttctacatggaaatcgctaagatgcgagcgggccggcgactctgggctcatctgatcgagaagatgttccagccaaaaaattcgaaatctcttctcttgagagcgcattgtcaaacttccggttggtccctgaccgagcaggacccctataacaacatcgtccgcactgctattgaagccatggccgccgtttttggtggtacacagagccttcacacaaactcttttgacgaagccctgggattgcccactgttaagtcagcgagaatcgctcgaaatacccagattattatccaggaggaatcaggcattccgaaggtggccgatccatggggggggtcctacatgatggagtgtttgacaaacgacgtatatgacgcagccctgaagttgatcaatgaaatcgaggagatgggcgggatggccaaggccgtagctgaaggtattcccaaactgcgaatcgaggaatgcgcagccagacgccaggcacgaattgactcgggtagtgaggtgatcgtcggcgtgaacaagtaccagctcgagaaggaggacgctgtcgaggtcttggcgattgataacactagcgttcgaaatcgacagattgaaaagttaaagaaaatcaagagctcaagagatcaggccctggctgaaagatgtctcgccgcactgactgagtgtgcagcttccggagacggaaatatcctggccttggcagttgatgcaagtcgtgccagatgcactgtgggtgaaatcacagacgccttaaaaaaagtcttcggagagcataaggcgaatgaccgtatggttagcggcgcttacagacaagagttcggcgagagcaaggaaatcaccagcgcaataaaacgtgtgcataaattcatggaacgggaaggccggcgtcctcggctgctcgtggccaagatgggccaggacggccacgataggggcgccaaggtcattgctaccgggtttgctgacctcggatttgatgtcgacattggcccactttttcagacgcctcgggaagtcgcacaacaagctgttgatgctgacgtccatgcagtgggtgtgagtacgcttgctgccggtcacaagacactggtccctgagctgataaaggagttgaactcccttggacggcctgatatcctggtgatgtgcggaggcgtcatccccccacaggactatgaattcttgtttgaagtaggcgtgagtaacgtgttcggtcctggaacaagaattccaaaggcagctgtgcaagtcctagacgatattgaaaaatgccttgagaaaaagcaacaatcggtg

SEQ ID NO: 54 - DNA, 2250 bp, Artificial Sequence
  Codon optimized sequence that encodes an MCM polypeptide with the I671V mutation
atgctccgagccaagaatcaactcttcctcctctctccgcactatttgagacaagttaaggagagctcaggctcccggctaattcagcagcgactcctgcatcagcagcagccactgcatccagagtgggctgctctggctaagaagcagctgaagggaaagaaccccgaagacctgatttggcacacccctgaggggattagtatcaagcctctctactcgaagagagatactatggaccttcctgaggagctgcccggggtcaaaccattcaccaggggaccatatcctaccatgtacaccttccggccttggacaattaggcagtatgctggattttctaccgtggaggagagtaataagttttataaggacaatattaaagctggtcaacaaggattgtccgttgccttcgacttggccacccatagggggtatgacagcgacaatcccagggttcgcggagatgtcgggatggcaggcgtggccattgatactgtcgaggataccaagattttgtttgacggaatcccacttgagaagatgtccgtatctatgacaatgaatggcgctgttatccccgttcttgccaatttcatcgtcaccggcgaggaacagggagtgcctaaggagaaacttacggggactatccagaacgatatcctgaaggagttcatggttagaaacacttatatattccctccagaaccgtcgatgaagatcattgccgatatttttgaatacactgccaagcatatgccgaaattcaactcaatcagcatctcagggtatcacatgcaggaagcaggcgcagatgcgattctggaattagcatatactctggccgacgggctggaatactcacggacaggtctgcaggcaggcttgaccatagacgaatttgcccccagactttcctttttttggggaattggtatgaatttttatatggagattgctaagatgagagccgggcgcagactgtgggcccatctaatagaaaaaatgtttcagcccaaaaacagcaaatccctgcttctgagggcccactgccagacaagcggatggagtctgaccgaacaggatccatataacaacatagtgcgaacagcgatcgaagctatggccgccgtatttggggggacccagagtctgcacaccaattcctttgacgaagcacttggcctccctactgtcaaatctgcacgcattgcccggaacacacagatcatcattcaggaggagtctggcatccccaaagtagccgacccatggggggggtcgtacatgatggagtgtttaacaaacgatgtatatgacgccgccctgaaattaatcaacgaaatcgaggagatgggaggcatggctaaggcagtggctgaaggaatacccaagctccgaatcgaggagtgcgccgcgcggcgacaggcgcgcattgactctgggagcgaagtcatagtcggtgtgaataagtaccagctagagaaggaggacgcagtcgaggttttggccatcgataacacatccgtgcgcaacagacagatagagaaattgaagaagatcaagtcctcaagggatcaggctcttgcggagcggtgcctcgccgccctgactgagtgcgcagcatctggcgacggcaacatcctcgccttggcagtggatgcaagccgggctcgatgtaccgtgggcgagattacagacgcacttaagaaagtgtttggagagcataaagcaaacgatcgcatggtgagtggcgcttacagacaggagttcggcgagtccaaagaaatcactagcgccatcaaacgggtccacaagttcatggaaagggaaggcagaaggcctcgtctcctcgtcgccaagatgggccaggatgggcacgaccgcggagccaaggtgattgctactggctttgcggatcttgggtttgacgttgatattgggccgctttttcagactccaagagaggttgcccagcaggctgtcgatgctgatgtccacgccgtgggcgttagcaccctggctgccggtcataagaccctggtaccagaattaataaaggaacttaacagccttgggcgcccggatattctagttatgtgcggtggtgttatccctccccaagactatgaattcctgtttgaagttggagttagcaacgtgtttggtcctgggacaagaattcctaaggccgcggtacaggtcctcgacgatatcgaaaagtgtctcgaaaagaagcaacagagcgta

SEQ ID NO: 55 - DNA, 2250 bp, Artificial Sequence
  Codon optimized sequence that encodes an MCM polypeptide with the I671V mutation
atgttgcgggccaagaatcaactgttccttctttctcctcactacttacggcaagtgaaggagtcttccggatccaggctaattcaacaacggctcctgcatcagcagcagcctctgcacccggagtgggccgcccttgccaaaaaacagctcaaaggtaagaacccagaggatctgatctggcacacccccgaaggcatcagtatcaagcccctgtatagtaaacgggacacaatggacctgccggaggagctgccgggagtcaagccctttactcggggtccataccccacaatgtacacttttcggccttggactatccgccagtatgccgggttcagcaccgtagaagaaagtaacaaattttacaaggacaatattaaagcagggcaacagggtctgtcagtggcatttgacctggccactcacagagggtatgactctgataacccccgcgtgagaggcgatgtaggcatggcaggtgttgccattgacacggtcgaagatacgaaaatcttgttcgatggaatccccctcgaaaaaatgtcagtgagcatgactatgaacggagccgtaatccccgtgctggctaatttcatcgtaaccggcgaggagcagggcgtccccaaggagaaactgaccggcacgatacagaatgacatcctgaaggagtttatggtccgtaacacctacatattcccacccgaaccgtcgatgaaaattatcgctgatatatttgaatacacggccaagcacatgcctaagttcaactccattagcatctctggctaccacatgcaagaagcaggggctgacgccatcctggaactcgcctacacactggctgatggacttgaatactctagaaccggtctgcaagctgggttgacgatagatgagtttgctcccaggctctcattcttctggggcataggtatgaatttctatatggagatagctaaaatgagggccggtaggaggctgtgggcccaccttatcgaaaaaatgttccaaccgaagaatagcaagtctcttttgctgcgcgcccactgccagaccagtggctggtcacttacagaacaggatccatacaacaacattgtcaggactgccatcgaagccatggccgcggtttttggaggaacgcaatccttacacacgaacagctttgacgaggctttaggcttacccacggtgaagagcgctcggatagcaagaaacacccagataattattcaagaggaatcagggattccgaaggtagcagacccttggggcggttcctacatgatggagtgcctcactaacgacgtctacgatgccgctcttaaactcattaatgagatcgaggagatgggcggaatggcaaaagcagtcgccgaagggatcccaaagctcagaattgaggagtgtgccgctcgtcggcaagcaaggattgactcaggcagcgaggtcatcgtcggggttaataagtaccagctcgagaaagaagacgctgtggaggtgctcgctattgacaataccagcgtgcggaaccgtcagatagagaaattgaagaaaataaagtccagccgagaccaggcgctggcagaaaggtgtctggctgccctaacagagtgtgccgcgtctggcgacggcaacatcctggctctggcagtggatgcaagtagggcgaggtgcacggtgggggagatcactgatgccctcaagaaggttttcggggagcacaaggccaacgaccggatggtgagcggagcgtaccgacaagaattcggtgagtctaaggagattacctcagccatcaagagagttcacaaatttatggagagagaggggagacggcctcgcctcctggtggctaaaatgggacaagacggtcacgaccgaggagctaaggtgattgcaaccggctttgcagacctggggttcgacgtggatatcggccctctgtttcaaacgcctagggaagtcgcccagcaagccgtggacgctgatgtgcatgcagtgggagtgtcaactttggccgccggacacaagaccttggtccccgaactgatcaaagagctgaattccttgggaaggcccgatatacttgttatgtgcggcggggtgattcctccgcaggactatgagttcctgtttgaggtgggggtgagcaacgtcttcggacccggtaccagaatcccaaaggcagctgtgcaggttttggatgatattgagaagtgtctcgagaagaaacagcagtcggtg

SEQ ID NO: 56 - DNA, 2250 bp, Artificial Sequence
  Codon optimized sequence that encodes an MCM polypeptide with the I671V mutation
atgctccgcgccaaaaatcagctcttcctcctcagcccccattatctccgccaagtgaaggaatctagtggaagcaggctgatccagcagcggctgctccatcaacagcagccccttcaccctgagtgggcagccctggccaagaaacagctgaaaggaaaaaaccccgaagatctgatctggcatacaccagaggggatatcaatcaagccattgtatagcaaaagagatacgatggatcttccagaagagctgcccggtgtcaagccctttaccagaggcccctaccctaccatgtatacttttcgtccttggactatccggcagtatgctggctttagcactgtggaggagtcaaacaagttctacaaagacaatataaaagcaggacagcaaggcctttctgtcgcctttgacctcgccactcacaggggctatgatagcgacaacccaagagtaagaggtgatgtaggcatggccggagtggctattgacactgtggaggatacaaaaatcctctttgatggcatccctctggagaaaatgtctgtgtccatgaccatgaacggagccgtgatccccgtcctggcaaacttcatcgtcacgggggaagaacaaggcgtgccaaaagagaagctgaccgggaccattcagaacgacattctgaaagagtttatggttcggaatacctacattttccccccagaaccatccatgaagatcattgccgatatcttcgagtatactgcaaaacacatgccaaaatttaactccattagcatctccgggtaccatatgcaggaagctggagcggacgctattctcgagcttgcatacacccttgcggatggactcgagtactctcgcacaggcctccaggctggcctgacaatcgatgagttcgctccacggctgagcttcttctgggggatcggaatgaatttttatatggagatagctaaaatgcgggcggggcggcgtttatgggcacacctgatcgaaaagatgttccaacctaagaactccaagtccttgctgcttcgagcccactgtcagacctcaggatggtctttgaccgagcaagacccttacaataatattgtccgtaccgctatcgaggccatggccgccgttttcggaggcacgcagtcactccatactaatagctttgatgaggctctgggactgccaacggtgaaatccgcccggatagcccgtaatactcaaatcataatacaggaggagtcaggaattcccaaagtggccgacccttggggaggaagctacatgatggaatgccttaccaatgacgtgtacgacgctgccctgaaactgattaatgagattgaagagatgggggggatggcaaaagctgttgccgagggtatcccgaaactgaggattgaggagtgcgctgcaaggcgtcaggccagaattgattccgggagtgaagttatcgtgggggtgaataagtaccaactagagaaagaagatgcggtcgaggtcctggcgatcgacaatacaagcgttcgcaatcggcagatcgaaaaattgaagaagataaagtcttcaagggatcaggctctggcagagcggtgtctggccgccctcactgagtgtgccgcatcaggcgatgggaacatactggctctagcagtggacgccagccgtgctcggtgcactgtgggggaaattactgatgctctcaagaaggtgttcggagagcacaaggcaaacgatcgcatggtgtctggtgcatacagacaggagtttggcgagtctaaggagatcacgtctgctattaagagggtgcataaatttatggagagggaggggcgccgccctcggctgctcgtcgccaaaatgggccaggatggacatgataggggagccaaagtgatcgctactggatttgccgatttagggtttgacgttgatatagggccactcttccagacccctagggaagtcgctcagcaggccgtagatgccgacgttcacgctgtgggcgtgtctaccctggctgccggacacaaaaccttggttcctgagctaattaaagagcttaattccttaggtcgaccagacattctggtgatgtgtggtggagtgataccccctcaggactacgagtttttgtttgaggttggcgtttcgaatgtgttcgggcccggtacacgcattcccaaagcagctgttcaggtgctggacgacattgagaaatgtcttgagaagaagcaacaatccgtg

SEQ ID NO: 57 - DNA, 2250 bp, Artificial Sequence
  Codon optimized sequence that encodes an MCM polypeptide with the I671V mutation
atgctcagggccaaaaaccagctttttctcctctccccacattaccttagacaagtgaaggaatcctccggatccaggcttatccagcaaaggctcttgcaccagcagcagccgctgcatcccgaatgggcggccctcgcaaagaagcagttaaagggcaaaaaccccgaagatctcatatggcacaccccggagggtatctccataaagcccttgtattcaaagcgcgatacgatggacctgccagaggaactgccgggggtgaagccatttactagagggccatatcccaccatgtataccttcaggccctggaccatccgacagtacgctggcttctccaccgtggaggagagcaataaattttataaagacaacataaaagccggccagcaaggactctcagttgcgtttgaccttgccactcaccgtgggtacgattccgataatcctagagtaaggggggacgtgggcatggcgggggtggcaattgataccgttgaagacactaagattttgtttgatggcatccctctggagaagatgtccgtttccatgactatgaacggtgctgtcatcccagtgctggccaatttcattgtgactggcgaagagcaaggggtacccaaggaaaagctgacgggaaccatccagaacgacatcctcaaggagttcatggtgcgcaacacctacatctttccaccggagccctcgatgaaaataatcgccgacattttcgagtatactgccaagcatatgcctaaatttaattccattagcatcagcggctaccacatgcaggaagccggtgcagacgccattctggagctcgcctacactctcgctgacggactggagtatagcaggaccggcctccaggcgggcctgacgatagacgagttcgcacccaggctatcattcttctggggtatcggcatgaatttctacatggaaattgccaagatgagggcaggcaggcgcctgtgggcccacttaattgagaagatgttccagccaaagaattcaaagagtctgctattgcgggcccattgtcagacctctggctggtcgctgacagaacaggatccatataacaacattgtgcgcaccgccatcgaagctatggcagccgtttttggaggaacccagtccctgcacacaaattcttttgatgaggctctgggcctgccgactgtcaaaagtgcgaggatcgccaggaacactcagattattattcaggaggaatcgggtatcccgaaagtcgccgatccctggggaggatcttatatgatggaatgcctgaccaacgacgtgtatgacgcagcccttaaattgataaacgagatcgaggaaatgggaggtatggcaaaggcggtggccgaagggattcccaaactcaggattgaggagtgcgccgcccggagacaggcacgcatcgattccgggtccgaagtgatagtaggagtgaacaaataccaattggaaaaggaggacgccgtggaggtcctcgccattgacaatacgagcgtgcgcaacaggcagatagagaagttgaagaagattaaatctagccgtgaccaggcactcgccgagcgatgcctagcagctcttacggagtgtgccgccagcggagatggcaacatccttgctctcgccgtcgatgcaagtagagcaagatgtaccgtcggcgagataactgatgccttaaagaaggtttttggcgagcacaaggcaaatgacagaatggtctcaggcgcatatcggcaagagttcggagagtccaaagagatcacgtctgccatcaagagggtacacaaattcatggagagggaaggaagaagaccacgactgctggtcgctaagatgggccaggatggtcacgaccgcggcgcaaaagtgatcgcaacagggtttgctgacttgggctttgacgtggacataggacctttattccagacgccgcgggaagtggcacagcaggctgtggatgcagacgtgcatgcagtgggagtgtcaaccctggccgccgggcacaagaccctcgtgccggagctgattaaggaactgaactccctaggccggcccgatattctcgtgatgtgcggcggcgtcatacctcctcaagactacgaattcctgttcgaagtaggagtcagcaacgtttttgggccagggacaaggatcccaaaggcggctgttcaagttttagatgacatcgagaaatgcctcgagaaaaaacaacagtcagtt

SEQ ID NO: 58 - DNA, 2250 bp, Artificial Sequence
  Codon optimized sequence that encodes an MCM polypeptide with the I671V mutation
atgctgagggcaaaaaatcaactctttcttctgtccccacactacctgcgtcaggtaaaggagagttccggtagcagattgatccagcagagactgctccatcagcagcagcctctgcatcccgagtgggccgctctggctaaaaaacagctgaaggggaagaatcccgaggacttgatctggcatacccctgagggaatctccatcaagcctctatacagcaagcgggacacgatggatcttccagaagagctgcctggagtgaagcctttcaccagagggccgtaccctacaatgtacacatttcgcccctggactattcgtcaatacgctggctttagtacagtggaggaaagcaacaagttttacaaagataatatcaaggctggccagcaaggcctgtcagtcgcttttgaccttgctacccatcgggggtatgacagcgataacccccgcgtgagaggagatgttggaatggccggtgtggccatagatacagtggaagatacgaagattctcttcgatggtatcccactggaaaaaatgtctgtgagcatgaccatgaatggagctgttattccggtgcttgctaattttattgtgactggagaggagcagggagtgccaaaagaaaagctcacgggcacaattcagaacgacattttaaaggagttcatggtcagaaacacctatatcttcccccccgagccctcaatgaaaattattgctgacattttcgagtatacggcaaagcatatgccaaagttcaactctatttccatctctgggtatcatatgcaggaggctggcgccgacgccatcctcgagttggcatacacactcgcggacggccttgagtactcacgaactggcctccaggcagggttgactatcgacgagtttgccccaaggttgtcattcttttggggaattggaatgaacttttatatggaaatcgcaaaaatgagggccggaagaaggttgtgggcccatctcatcgaaaagatgtttcaaccaaagaacagtaagtcactgctgctccgggcccattgtcagaccagcggatggtcactaactgagcaagacccttacaacaatattgtgcgaactgccatcgaggccatggctgccgtgttcggcggaactcagagtctgcacactaacagcttcgatgaggcactcggcttgccaaccgtgaagtctgccaggatcgctaggaatactcaaatcatcattcaagaagagtcagggataccgaaagtagcggacccatggggtggctcttacatgatggaatgcctgaccaatgacgtgtacgacgccgctctcaagctcattaatgagatcgaagagatgggagggatggccaaagcggtcgcagaaggaatccccaagctacgcatagaagagtgtgctgcacgccgtcaggcgagaatcgatagtgggtctgaagtcatcgtgggcgttaataagtaccagttagagaaagaggatgcagtcgaagttctggccatagacaatacttctgtacgcaatagacagatcgagaaattgaagaaaatcaaatcttcaagagatcaggcgctggcagaaaggtgtctggccgctctgacggagtgtgccgcttccggcgatggcaatatacttgcactcgccgttgacgcgagtcgggcacgctgcaccgttggcgagattactgatgccctcaagaaggtctttggggagcacaaggcaaacgaccgcatggtaagcggagcctacagacaagaatttggggagagtaaggagattacatccgctattaagagagtacacaagttcatggaaagggaaggacggcgtcctcgcctgttggtggcaaaaatggggcaggatggtcacgacagaggggctaaagtaattgccacaggctttgctgatcttggatttgacgttgatatcggcccactgtttcagaccccccgcgaagttgcccagcaggcagtggatgctgacgtgcacgcagtcggcgtgagcaccctggcagccgggcacaaaactctggtcccagagctcattaaggagctcaattcactcggccgccccgacattctcgtaatgtgcggaggagtgatacctccccaggattacgaattcctgttcgaagttggggtctccaacgtctttggcccaggcacaagaatcccaaaggccgctgtgcaggtactagatgatatcgagaagtgccttgaaaagaagcaacagtctgtt

SEQ ID NO: 59 - DNA, 2250 bp, Artificial Sequence
  Codon optimized sequence that encodes an MCM polypeptide with the I671V mutation
atgctcagagccaaaaatcagctcttcctgctgagcccacactacttacgtcaagtgaaagagagctctggcagcagactgattcaacagcggcttctccatcagcaacagccactccaccccgaatgggcagccctggccaagaaacagcttaaggggaaaaatccagaggatcttatttggcacactccagagggcattagtatcaagcccttatattcaaagagagataccatggatctccccgaagagcttccgggtgttaagcctttcacgaggggcccataccctacaatgtacacgttccgaccatggaccatccgacagtacgctggtttctctaccgttgaagagtccaacaagttttataaagacaatattaaagccggccagcagggcctcagcgtggcatttgacctcgctacccatcggggctatgattcagacaacccaagggtgcggggcgacgtcggaatggccggggtggcaattgatacggtagaggatactaaaatcctcttcgacgggatcccccttgagaaaatgagcgtaagtatgaccatgaacggcgccgtgattccggttctcgctaacttcattgtgacaggtgaggagcaaggtgtccctaaagaaaagctcaccggaacaattcagaacgacattctcaaggagttcatggtgaggaatacatacatctttcctcccgagccaagcatgaaaattattgctgatatcttcgaatacaccgccaaacatatgcctaaattcaattcgatttctatctccggttaccacatgcaagaagccggggccgatgccattctggagctggcttacacgctagcggacggtttagaatattcccgtacaggcttgcaggctgggctgaccatcgacgaatttgcccccaggctctctttcttctgggggatcggcatgaacttttatatggaaatcgctaagatgcgtgccggaagaagactctgggcccacttaatcgagaaaatgttccagcctaaaaattctaaaagccttctgctgagggcgcattgtcagacaagtgggtggtctttgacagagcaggatccctacaataatatcgtgagaacagccatcgaagctatggccgcggtcttcggcggcacacagagcctgcataccaatagctttgatgaagccctaggtttacctacagtaaagtccgcgagaatcgctcgaaacacccagatcatcattcaggaagagagtggtataccaaaggtggccgatccttggggcggctcgtacatgatggaatgcttaaccaatgacgtgtacgatgccgctcttaaactcattaacgagatagaggagatgggaggcatggctaaagctgtcgccgaaggtatccctaaactccggattgaagaatgcgctgcccgcagacaggctcgtatagattcaggctccgaggtgattgtcggcgtgaacaaataccagctggagaaggaggacgccgtcgaagtgctggcaattgacaatactagcgtccgcaataggcaaatcgaaaagttgaaaaagatcaaatcctcacgggatcaggcgctggcagagagatgtctggctgccttgaccgagtgcgctgccagtggtgacggtaacattctggcattggccgtggatgcatcacgtgcccggtgcactgtgggagagatcaccgacgccctgaagaaggtattcggcgagcataaggcaaacgatcgaatggtttcaggtgcttacaggcaggaattcggagagtcaaaagaaattacgagtgcaatcaagagggtccataaatttatggaaagggagggcagaaggcctcgcttactggttgctaaaatggggcaggacgggcacgatcgcggagctaaggtgattgccacaggatttgcagacttaggttttgacgtggacattgggcccttattccagaccccccgcgaagtggctcagcaagctgtggatgcagatgtccacgccgtaggggtgagcactcttgccgccgggcacaaaacactggtgccagagctgatcaaggagctgaactccctgggccgacctgacatattagtcatgtgcggaggagtcattcctccgcaagattatgaatttctgttcgaggttggggtgtccaacgtctttggaccagggactagaatcccaaaagccgctgttcaggtgctggacgatattgaaaaatgtttagaaaaaaaacaacagtctgta

SEQ ID NO: 60 - DNA, 2250 bp, Artificial Sequence
  Codon optimized sequence that encodes an MCM polypeptide with the I671V mutation
atgctaagggccaaaaatcaacttttcctgctgagcccgcactatttaaggcaggttaaggaatcctcaggttccaggctgatacagcagcggttgctccatcagcagcaacctttgcatcccgagtgggctgctctggcgaaaaagcagttaaaaggcaaaaatccagaggacctcatctggcatactcctgagggcatctctattaagcccctgtattccaaacgcgatacaatggatcttcccgaagaattgccaggtgttaagccattcactagggggccttaccctaccatgtacacgtttcggccttggacgatccgccagtatgcaggatttagcaccgtggaggagtctaataaattctacaaagataacattaaagcgggccagcaaggtctgtccgtagccttcgatttggccacccatcgagggtacgattccgacaatcctcgggtgcgaggtgacgtagggatggccggggttgccattgatactgttgaggatactaaaatactcttcgatgggatcccccttgaaaaaatgagcgtgtcgatgacaatgaatggggctgtgatccctgtcctggctaactttatagtgacaggagaagagcaaggagtcccaaaggaaaaactcactgggacaattcagaatgacatactcaaggagtttatggtgcgaaatacatacatcttccccccagagccctccatgaagatcattgctgacatcttcgagtataccgctaaacatatgcctaaattcaacagcatatcaatctccgggtatcacatgcaagaggccggggcagatgcaatacttgagctcgcgtatacactggccgatggccttgagtatagcagaaccgggctccaggccggcctgactattgatgaatttgcgccacgtctctcctttttctggggaatcgggatgaatttctacatggagatcgccaaaatgcgcgccggtaggcggctgtgggctcacctgattgagaagatgttccagcccaagaatagcaagagccttctgctcagagctcattgccagacctcaggatggagcttaacggaacaggatccgtacaacaatatcgtgcggacagcaatcgaggcaatggccgccgttttcggtggcacccaatcactgcatactaactcgttcgatgaggcgctaggcctccctacagtgaaaagcgcaaggatcgccaggaacactcagataataatccaggaagaatctggcatccctaaggtggctgacccctggggaggttcttacatgatggagtgcctgactaatgacgtttatgatgccgcgctgaaacttatcaacgagattgaagaaatgggaggaatggccaaggctgtcgctgaaggcatccccaagctgaggatcgaagagtgtgcagcacggaggcaagccaggatagatagtggcagcgaagtcatcgttggcgtgaataagtaccagcttgagaaggaagatgcagttgaagtcctcgccattgacaacacctctgtgcggaaccgtcagatcgaaaaactgaagaagatcaaaagctccagagaccaggccttggcggaaagatgtctcgcggcattgacagagtgcgcggcttctggggatggtaacatcctggcccttgccgttgacgcatctcgggccagatgtactgtcggagaaattaccgacgccttgaagaaggtgttcggagagcacaaagcaaatgaccggatggtcagcggtgcctacaggcaggagtttggcgaaagcaaagaaataaccagcgccataaaacgtgtccataaattcatggaacgggagggccgacggcctcgcctcctggtggccaagatgggccaggatggccacgataggggggctaaggttatcgctaccggttttgctgatcttggattcgatgttgacatcggcccactgttccaaacccctcgagaggtggctcaacaggccgtggatgccgatgttcacgcagttggcgtaagcaccttggccgcaggccacaaaacgctggtgccagaactcatcaaagagttgaacagtctgggacggcccgacatactggtaatgtgcggcggagtgatcccacctcaagattacgagttcttatttgaggtgggtgtgagcaatgtgttcggacccggcacccggatcccaaaagccgccgtccaggttctcgatgatattgaaaagtgcctcgaaaaaaagcaacaatcggtt

SEQ ID NO: 61 - DNA, 2250 bp, Artificial Sequence
  Codon optimized sequence that encodes an MCM polypeptide with the I671V mutation
atgcttcgtgctaaaaatcagttatttttgctctcaccacactacctgcggcaggtgaaagaatctagcgggtcccgcctgatccagcaacgactgttgcatcaacaacagcccctccatcctgaatgggctgctcttgcaaagaaacagcttaagggtaaaaatccggaagatttgatctggcacacaccagagggcatttctattaagcctttgtattcaaaaagggatactatggacttacccgaggagctgcccggagtcaaacccttcacccgtggcccgtatcccaccatgtatactttccggccgtggaccattaggcagtacgcagggttctccaccgtcgaagaatcaaataagttctacaaggataatatcaaagctggtcaacagggcttatctgtggctttcgatctcgccacccacagagggtatgacagtgacaatcctcgcgtgcgaggagatgtcgggatggctggcgtcgctatcgacactgtggaggatacaaagatactgtttgatggcattccactcgagaaaatgagcgtgtccatgactatgaatggtgccgtgattcctgttctggctaattttatcgtgacaggagaggagcaaggtgtgcccaaggagaagctcaccggtaccatccagaacgacatcctcaaggaattcatggtccggaatacttacattttccccccagagccatccatgaagatcatcgccgacatcttcgaatacaccgcaaagcacatgccgaagttcaactctataagtatctccggctaccacatgcaagaagccggagccgatgccatcttggagcttgcatatactttagctgatggactggaatattctcgtacggggctgcaggctggcctgaccatagacgagttcgcgccacgactgtcatttttctggggcattggaatgaatttttatatggagatcgccaagatgcgggccggtagacggctgtgggctcacctgattgaaaaaatgttccaaccaaaaaactctaagagcttgttgctgagggcgcactgtcagacttcaggctggagtcttacagagcaagacccttacaacaacatcgttagaacagctattgaagccatggctgctgtatttggaggcacccaatccctccacaccaactcattcgatgaggccctgggcctcccgacagtcaaatccgccagaatcgctaggaacacacaaataattattcaggaagagagcggaatcccaaaggtggcagacccttgggggggcagctatatgatggagtgcctgactaacgacgtctacgatgccgcccttaaactgattaatgaaatcgaagagatgggtggcatggctaaggcggtggccgaaggcatcccaaaactgcgcatagaggaatgtgccgcccgccggcaggcgaggatcgactcgggaagcgaggtgattgttggggtgaataaataccaactggaaaaagaggacgccgttgaggtcctggcaatagataacactagtgtgcgtaaccggcagattgagaagcttaaaaagatcaagtcctctagagaccaagccctggcggaacgttgtctggccgccctgacagaatgtgcggcaagcggggatggaaatattctggcactggcagtggatgcttcccgagctcgttgtaccgtcggggagatcacggacgccctgaaaaaagtgttcggcgagcacaaggctaatgacagaatggtttcaggcgcttataggcaggaatttggtgagagtaaggagattactagcgctattaaacgggttcataagttcatggaacgagaaggtcgacggcctagactactggtagctaaaatgggccaagacggccacgacagaggggccaaggtcattgcgactggctttgccgatttgggcttcgacgtcgatatcggaccacttttccagacgcctcgagaggtagcacagcaagcagtcgatgccgatgttcatgccgtgggagtgagcacactggcagcgggccacaaaacactagtgcccgaactgatcaaggagctgaattccctcggcagaccagatatcctagtaatgtgtggcggcgttattcctccacaggactacgaattcctatttgaggtcggcgtcagtaacgtgtttgggcctggcactcgtattcccaaagcagcggtgcaggttctagacgatattgagaagtgcctggaaaaaaagcaacaaagcgtg

SEQ ID NO: 62 - DNA, 2250 bp, Artificial Sequence
  Codon optimized sequence that encodes an MCM polypeptide with the I671V mutation
atgctccgtgctaaaaatcagctttttctgctatccccccactatctgagacaggttaaagaatcgtctggctccagactgattcagcagcgccttcttcaccagcagcagccattgcaccccgagtgggctgcgctcgccaaaaaacagctgaaggggaaaaaccctgaggacttaatctggcataccccagaaggtatcagcataaagcccctgtatagcaaacgggatacgatggacctgcctgaagaactgccaggcgtgaagccgtttaccaggggtccataccccaccatgtatacctttcgcccttggactatccggcagtacgcgggattctctacagtggaggagagtaataaattttacaaggataatataaaggcaggccaacaggggctgtctgtcgcctttgacttggccacgcacagagggtatgattccgataacccgcgcgtgcggggcgatgtgggcatggctggcgtcgctattgacacagtggaggacacaaaaatactctttgatggtatccccttggagaaaatgagcgttagtatgactatgaacggggcagtgatccctgtgctcgccaatttcatcgtgacaggcgaagagcagggcgtgcctaaagaaaaactgaccggaaccatccaaaatgatatcctgaaggagtttatggtgcgaaacacctatatctttcctcctgagcccagtatgaaaattattgctgacatattcgaatacacagctaaacacatgcccaaatttaactcgatttctatatcaggttaccacatgcaagaggctggtgctgatgctatcctcgagctcgcgtatactctcgcagatggccttgagtactcacgcaccggactccaggccggtctcactatcgacgagttcgccccacgcctgagctttttttggggcatcgggatgaatttttacatggaaattgccaagatgcgagccggaagacggttatgggcgcacctgattgaaaaaatgttccagcctaagaatagtaaaagtttgctactgcgcgctcactgccagacaagcggatggtctcttactgagcaggatccatacaacaacatcgtgcgcactgctatcgaagctatggctgcagtgtttggcggaactcaatccctccacacaaactccttcgacgaagccctgggcctgccaacagtgaagtccgctaggatcgctcggaatacccaaatcatcattcaggaggaatctggtattcccaaagttgctgatccttggggtggctcctacatgatggaatgtttgacaaacgacgtgtacgatgctgcgcttaaactgattaacgaaatcgaagagatggggggcatggctaaagcagtggctgagggcattccaaaactccgcattgaggagtgtgcagctcgacggcaagcccgaattgactcgggtagcgaagttattgtgggcgtaaacaagtaccaactggagaaggaggacgctgttgaagtcctagcgattgataacacctccgtccgtaacagacaaattgagaagttgaaaaagatcaagagttcgcgggaccaggcactagccgagcggtgcttagctgctctgactgaatgcgctgccagtggtgatgggaatattctggcgctggcagtcgatgctagtcgagcccgatgtaccgtgggagaaatcacagacgctctgaaaaaggtcttcggagaacataaagctaatgaccgcatggtcagcggtgcataccgacaagaatttggggaaagcaaggagattaccagcgctatcaagagggtgcacaagtttatggagagggagggcagaaggcctcgtcttctcgtcgccaagatgggtcaggacgggcacgatcgcggtgctaaagtgatcgccacaggctttgcggatctcggctttgatgtcgatattggtcccctctttcaaaccccacgcgaggttgcacagcaagctgtcgacgctgatgtgcacgcggtgggcgtgtccacgctagccgcaggacataaaacactggtaccagaactgattaaggaactgaatagtctcggacgtccagacattctcgtgatgtgtggtggagtgatacccccacaagattacgagttcttgtttgaggtgggggtgtctaatgttttcggtcctggcacaagaatccccaaagccgctgtgcaggtgctggacgatatcgagaagtgcctagagaaaaagcaacaaagcgtc

SEQ ID NO: 63 - DNA, 2250 bp, Artificial Sequence
  Codon optimized sequence that encodes an MCM polypeptide with the I671V mutation
atgcttcgggctaaaaatcagctttttttgctgagcccccattacttacggcaggttaaagagagttctggatctaggttaatccaacagagattgctgcaccaacaacagcctctacacccagagtgggccgccttggcgaagaagcagctgaaaggaaagaatccggaagatctcatctggcacacccctgagggcatctctataaaacctctgtattccaagcgcgacactatggacctgccagaggagcttcctggtgtgaagcccttcacacgcggcccgtatcctactatgtatacattccgtccatggaccattagacagtatgctggcttttctacagtggaggaatctaataaattctacaaagataacattaaggccggacagcagggcctaagtgtggctttcgatctcgccacccatcgcggatacgatagtgacaaccctagggtccgtggagatgtgggcatggccggcgtcgcaatcgatactgtggaagacacaaaaatactttttgacggaatcccacttgagaaaatgtcagtttctatgaccatgaacggggccgtcattcccgtactggcaaatttcattgttaccggggaggagcagggagtgccgaaagagaagcttaccgggaccattcaaaatgatatcctgaaggagttcatggttaggaatacttatatcttcccacctgagcccagcatgaaaattattgcggacatctttgagtacaccgcaaagcatatgcctaagttcaattcgatctccattagcggatatcatatgcaggaggcaggcgcggacgctattttggaactggcgtatacccttgccgacggccttgaatactctaggacaggactgcaggctgggctcaccatcgacgagttcgccccccgccttagctttttttggggcattgggatgaacttctatatggagatagccaaaatgagggcgggtcggaggctgtgggcccacctaatagaaaaaatgttccagcccaagaatagtaaatcattgctgttgagggcgcattgccagacttctggatggtcactgacagaacaggacccctacaataacattgtgcgcaccgcaatcgaagcgatggccgcggtgttcggtggaacccagagtctgcacacgaattctttcgacgaagcactcgggctgcccaccgtgaagtcagctaggatcgcacgcaacacacagataatcatccaggaggagagcgggatccccaaagtcgctgatccctggggtgggagctacatgatggagtgtctgacaaacgatgtttatgatgcagcactgaagctaattaatgagatcgaagagatgggtggcatggccaaggccgtggccgaagggatacccaaacttcgcattgaagaatgcgctgccaggcggcaggcgaggatcgacagcgggtccgaggtgattgtgggggtgaacaaatatcagctcgagaaagaggatgcggtggaagttttggcgatcgataacacttctgtacgaaatcgtcagattgagaaattgaagaaaatcaagagctctagggatcaggctctcgctgaaaggtgtcttgccgcattaacagagtgcgccgcgtcaggagatgggaacatcctcgccctcgccgtggacgcttcacgcgctagatgtacggtgggagagatcaccgacgcactgaaaaaagttttcggggaacataaggctaacgaccgaatggtaagcggtgcctatcgacaggaattcggcgaatccaaggagatcacatcagccatcaaaagggtccataagtttatggagagggagggaagacgccctcgactgctggtcgccaagatgggacaggatggccacgaccgaggagcgaaggtgatagccaccggcttcgccgatctgggcttcgacgtggacatcggccccttattccaaactcccagggaggttgcccaacaggcagtggacgcggatgtacatgcagttggagtctctacgctcgccgctgggcacaagactcttgtgcccgaactcattaaggagcttaattccttgggtcgtccagatatcttagtaatgtgcggtggggttattcctcctcaggactatgaatttctctttgaagtgggcgtctcaaatgttttcgggcctggcacacgaattccaaaggcagcagtgcaagtactcgacgacatcgagaagtgcttggaaaagaaacagcagagcgtt

SEQ ID NO: 64 - DNA, 2250 bp, Artificial Sequence
  Codon optimized sequence that encodes an MCM polypeptide with the I671V mutation
atgttgagggccaagaatcagctgtttctgctgtccccccactacctccgacaagtaaaggagagttctggaagcagattgatccagcagcggctcctccatcagcagcagcctcttcacccagagtgggcggccctcgccaagaagcagcttaagggaaagaacccagaggatctcatctggcatacacccgaagggatcagcatcaaacccctgtactccaaacgggacacaatggacctgcccgaggagctccctggggtgaaaccatttactaggggcccttatcccacaatgtatacttttaggccctggactataaggcaatacgccggattctccactgtagaggagagcaacaagttctataaggacaatatcaaagccggacaacaggggctcagtgtggccttcgatttagccactcaccgcggttacgattccgacaatccacgggtgcgtggcgacgtcggaatggccggagtagccatcgacacagtggaggacacaaagatcctgttcgatggtatccctcttgaaaagatgtctgtgagcatgactatgaacggcgccgtgattcccgtgctggctaacttcatagtcaccggggaagagcagggagtccccaaggagaaactaaccggaacaatacagaatgatatacttaaagaattcatggtcagaaacacctacattttccctccagagccatcaatgaagattatcgccgatatctttgagtatactgccaagcacatgcccaaattcaattccatatctattagcggttaccatatgcaggaagcaggcgcggatgcgatcctggaactggcttacacgctggccgacgggctcgagtattcacgcacagggctgcaggcagggttaaccatcgatgagttcgcccccaggctttcttttttctggggaatcggaatgaatttttatatggagatcgccaagatgagggcggggcggaggctttgggctcatctgatcgaaaaaatgtttcagcccaaaaattcaaagtctctgttgcttagggctcactgtcagacaagcggctggagccttaccgaacaggacccttacaacaatattgtgcggaccgctatagaggcgatggctgccgtgttcggcggaacccagagcctgcacaccaactccttcgatgaagccctgggccttcctacagtgaaatccgcccggatcgctagaaacactcagatcatcatacaggaggagtctgggattcccaaggtggccgatccctggggaggtagctacatgatggagtgccttaccaatgatgtatacgatgccgccctgaaactgattaatgagattgaagagatgggtgggatggcaaaggctgttgccgaaggtattcccaagctgcgcattgaggaatgcgcagcaaggcggcaggcaagaatcgacagtgggagcgaggttatagtgggggtgaacaaatatcagctggagaaagaagatgctgtagaggtcctggcgatagacaacacaagcgtgcgcaaccgacagattgagaaacttaagaaaattaagagttcccgggatcaagccttagccgagcggtgtctcgcagcactgaccgaatgtgctgctagcggggatggaaacattctggctttggcagtggatgccagcagggctcgttgcacagtcggcgaaatcaccgatgccctgaagaaagtgttcggggaacataaggctaacgatcggatggtgtccggcgcctatcgccaggagttcggggagagcaaggagattacaagcgccattaaaagggtgcataagttcatggagcgcgagggaaggcgacctaggctgctcgtcgcaaagatgggccaagacggtcatgacaggggcgctaaagtcattgccaccggcttcgctgatctcggatttgacgtggatatcggccctctgttccaaactccacgggaggttgcccaacaagctgtggatgccgatgtgcatgccgtaggcgtcagtacgctcgctgccggccacaagactctcgtgccggagctgattaaggaactgaattccctcggcaggcctgacattttggtcatgtgcggaggagtcatccctccacaggattacgagtttctgttcgaagtgggcgtgagcaacgtgtttggccccggaacgcgaatccccaaggccgccgtgcaggttctcgatgacatcgaaaaatgtttggaaaaaaaacagcaaagcgtt

SEQ ID NO: 65 - DNA, 2250 bp, Artificial Sequence
  Codon optimized sequence that encodes an MCM polypeptide with the I671V mutation
atgcttcgggccaagaaccagttgtttttgctaagtccacattatcttagacaggtcaaggagagcagcggatcccggcttatccagcagcggctgttacatcagcaacagccgcttcatccagagtgggcggctcttgccaagaagcagctgaagggtaagaaccctgaagacctaatatggcacacacctgagggcatctcaatcaagccactctatagcaagagagatacaatggaccttcctgaggagctaccgggtgtgaagccctttactagggggccctaccccaccatgtacacctttcgcccatggaccattcgccagtacgctggcttctccactgtcgaggaatcgaacaaattttacaaagataatattaaagctggtcagcaaggcctttcggtcgctttcgatctggcaactcataggggctacgactcagacaaccctagagtgcggggcgacgtaggaatggcgggagttgccatcgatactgtggaggacacaaaaatactttttgatgggatcccattggagaaaatgtccgtgtcaatgaccatgaatggagctgtgatccccgtgctggccaacttcattgtgacgggtgaggaacaaggcgtcccaaaagaaaagttgactggaaccatccagaatgacattctgaaggaattcatggtacggaacacctacatcttccctccagagccatctatgaaaatcatagctgatatctttgagtataccgcgaagcacatgcccaagttcaactctatcagcatatccgggtaccacatgcaggaagccggcgccgacgccatcctcgagctggcctacactttggccgacgggctggagtacagtcggactggcctgcaagcgggattaacgatcgacgagtttgccccgcgcctttcatttttttgggggatcggtatgaacttctatatggagatcgctaaaatgcgtgcagggcgaagactttgggcccaccttatcgagaagatgtttcagcccaagaactcaaagtccctccttttaagggcacactgtcagacatcaggatggtcccttactgagcaggatccttataacaatattgtgcgaaccgcaatcgaggccatggcagccgtgttcggaggaactcagagccttcacacaaattccttcgatgaagcactgggccttccgaccgtgaaaagtgccagaattgccaggaacacccagattataattcaagaggagagcggcatcccaaaggttgccgatccctggggtggcagttacatgatggagtgtttgactaacgacgtttatgatgctgccttaaaactgatcaatgaaatcgaggaaatgggcggtatggccaaagctgtggcagagggcatccccaagctacggattgaagaatgcgctgcccgaagacaggcaaggatcgactcaggatcagaagttattgtgggcgtcaataaataccagctagagaaggaggatgcggtagaagtcctggccatcgataatactagcgtgcggaaccgccagattgagaagctcaagaaaattaaatctagtcgcgaccaggccctcgcagaaaggtgccttgcggctctcaccgaatgtgcagcgtcaggcgacggtaacatcctggcgctggccgttgatgccagtcgagctaggtgcactgtgggagaaattacagacgctctcaagaaagttttcggcgagcacaaggcgaatgaccgcatggtgtcgggcgcctatcgccaggagttcggagagagcaaggagattactagcgccattaaacgggtacacaagttcatggaacgcgaggggagacgtccacggctgctggtagccaaaatgggacaggacggacacgaccgcggagccaaagtgatcgcgacgggcttcgccgatcttggtttcgatgtggacattggcccgctcttccagacaccaagagaggttgcacagcaggcagtggatgcagacgtccacgctgtgggcgtcagcacgcttgccgctgggcacaagaccttggtccctgaactcatcaaagagttgaatagcctgggccggcccgacatcttggtgatgtgtggtggggtaatacccccccaggattacgagttcctgttcgaagtcggagtatcgaatgttttcggtcccggaacgagaattcctaaggctgctgtgcaagtgctggatgatatagagaagtgtcttgagaagaagcagcagagcgtc

SEQ ID NO: 66 - DNA, 2250 bp, Artificial Sequence
  Codon optimized sequence that encodes an MCM polypeptide with the I671V mutation
atgctgcgtgctaagaatcaactgttcctgctatctccccactatctgagacaagtgaaggagtcttccggatctcggttgattcagcaacgcctgctgcaccagcaacagcctttgcatcccgaatgggccgcactggcgaaaaaacagctgaagggcaagaatccggaagacctcatttggcacactccagaaggcatcagtatcaaacctctttattctaaacgagataccatggacctgcccgaagaactgcccggagtaaagccttttacccgcgggccatatccaactatgtacacttttaggccgtggactatcagacagtatgcgggctttagcaccgtcgaggagtctaataagttctacaaggataacattaaagccggccagcagggactgagtgtggcttttgacctagcgacacaccgcggctatgactcagacaatccccgagtgcgtggcgacgttggcatggcgggagtagccatcgacacagtggaagatacaaagatccttttcgatggcatcccactggagaagatgagtgtaagtatgacgatgaacggagcagtgataccagtcctcgccaactttatcgtgacgggtgaggagcagggtgtgccaaaagaaaagctgaccggaacgatccagaacgatatcctgaaggagttcatggtgcgaaacacatatatcttccctcccgagcctagtatgaaaatcattgctgacatcttcgaatataccgccaaacacatgcccaagttcaattctatctctatcagtggctaccatatgcaggaagccggagctgacgccatactcgaactggcttatacactcgccgacggtctcgaatactccaggactggcctacaagccggactgacaatcgatgaatttgctccacggttatcttttttctgggggattggcatgaacttttacatggaaatagccaaaatgagggccggccggaggctttgggcccatctgatcgagaagatgttccagcccaagaatagtaaaagccttcttctaagagcccactgccagacttctgggtggtctctcactgagcaggatccctacaataacatcgtcagaaccgctattgaagccatggccgccgtgtttggcggcacccaaagcttgcacacgaacagctttgacgaagcactcgggctaccgacagtgaagtccgcccgcattgctcggaacacccagattattatccaagaagaaagcggaattcctaaggttgccgatccctggggcggctcatatatgatggaatgtctgacgaatgacgtctacgatgcagcgctgaagctgattaacgagatcgaagaaatgggaggcatggccaaggctgtagctgagggcataccaaagctgcgcattgaggagtgcgccgcccggcggcaggcccgaatcgactccggtagcgaagtcatcgttggagttaataagtatcagttagaaaaggaggatgctgtggaggtgctggcaatcgacaataccagcgtgcggaatcgccagattgaaaaactcaagaagatcaaatcctcccgagaccaggccttggccgagcggtgcttggcggccttaacagagtgcgcggccagtggcgatgggaacattctagcactcgccgttgacgctagccgtgcaaggtgtacagtcggcgagatcacagacgctttgaagaaggtgttcggcgagcataaagcaaatgaccgcatggtgtctggcgcatatcgccaagagttcggagagtctaaggaaatcacctccgccatcaaaagagtgcataaattcatggagagggaagggcgccgcccacgtctgttagtggccaaaatggggcaagacggtcatgaccgaggggctaaagtgatagccacaggctttgctgatctgggatttgacgtggacataggccccctgttccagacgccaagggaagtcgcacagcaggctgtggatgcagacgtgcatgccgtgggggtgtctacactggctgccggacataagactcttgtgccagaactgattaaggagttaaatagtctgggacgcccagacattctggtaatgtgtggaggggtgatccctcctcaggactacgagtttctgtttgaagtgggcgtgagcaacgtgttcggacccggtacccgcattcccaaggcggcagtgcaggtgcttgatgatatcgaaaaatgccttgagaagaaacagcagagtgtg

SEQ ID NO: 67 - DNA, 2250 bp, Artificial Sequence
  Codon optimized sequence that encodes an MCM polypeptide with the I671V mutation
atgttacgggctaagaatcagctgttcctcctctcgccccattatctgcgccaggtcaaagaaagctccgggtctagattgattcagcagagactcctgcatcagcagcagcctctgcaccccgagtgggcagccctagcgaagaaacagctaaagggcaagaaccccgaggatctgatatggcacactcccgaagggatctcgatcaagcccctctattcgaagcgggacacaatggacctcccagaggagctccccggagtaaagcctttcactaggggcccatacccaaccatgtacactttccgcccttggactatacggcagtacgccggcttttccacagttgaggaaagcaacaagttctacaaggataatatcaaagccggccaacaagggttgtccgtggcatttgacctggcgactcacagggggtacgactctgataatcctagggtgcggggcgacgttgggatggccggggttgcgatcgataccgtggaggacactaaaatattgttcgacggcatcccattggagaagatgagcgtgtcaatgacaatgaacggagcagtgatacctgttcttgccaacttcattgtgaccggtgaagagcagggagtaccgaaggagaaactgacaggcaccatccagaatgacatccttaaagagtttatggtcagaaacacctatatattcccacctgagcctagtatgaaaatcatagcagacatttttgaatacacggccaaacatatgccgaagtttaactcaatcagcatctctgggtaccacatgcaagaggcaggtgccgacgctatcctggaactggcatacacgcttgcagatggtttagaatactccagaacaggattgcaggccggactcacaatcgacgaattcgcccctagactctccttcttctggggaattgggatgaatttctacatggaaattgccaaaatgcgggccggccgacgcctttgggcgcacttgattgagaagatgttccagcctaagaactcgaagtcgttactgctcagagcgcactgccagacatcggggtggtctttaactgaacaggacccttacaataatattgtgcgcactgccattgaggccatggcggccgtattcggcgggacgcaatcgcttcacaccaatagttttgatgaagctcttgggttacctaccgtgaagtccgcaagaatcgcccgcaatacccagattattatccaggaggagagcggcattccgaaagtggccgatccatggggcggcagctatatgatggaatgcctcaccaatgacgtctatgatgctgctctcaaacttataaatgagatcgaagagatgggtggcatggctaaagccgtggccgaaggcattccgaaattgcggatcgaggaatgtgcagcgagacgccaggctagaattgatagcggcagtgaagtaattgtcggggtgaacaagtaccagttagaaaaagaggatgccgtggaggtgctggccatcgacaacacttctgttcggaacaggcaaatcgaaaagctcaagaaaattaagtcaagccgagatcaagctctggccgagagatgtttggctgccttgacagaatgtgctgcttcgggggatggaaacatcttggctctggctgtggacgcaagccgggcacgttgtactgttggagagatcaccgatgccctgaagaaagtgtttggagaacataaggcaaatgataggatggtgagcggggcgtatcgtcaagaatttggcgagtccaaggagatcacttcagctattaaaagagtccacaaatttatggaaagggaagggaggagaccgaggctactggtggccaaaatgggccaggatggacatgaccggggggctaaggttatcgccacaggattcgctgatttgggattcgacgtggatatcggaccactttttcagacacctcgcgaggtagcgcaacaggcagtggatgcagatgttcacgctgttggtgtgtctacactggctgccggtcataaaacgttggttcctgagttaataaaagaactgaactcattgggacgacccgacatcctggtgatgtgtggcggtgtcatccccccccaggattacgagttcctgtttgaggtcggggtgtccaatgtctttgggcccgggaccagaattcccaaagctgccgttcaggtgttggacgatattgaaaagtgcttagaaaaaaagcagcagtcagtg

SEQ ID NO: 68 - DNA, 2250 bp, Artificial Sequence
  Codon optimized sequence that encodes an MCM polypeptide with the I671V mutation
atgcttagagccaagaatcaactgttcttactctcaccacactatctcagacaggtgaaggaatcaagcggaagtagactgattcagcaacgactattgcaccagcaacagccactgcaccccgagtgggcagcactcgccaagaagcagctgaaggggaaaaaccctgaagacctcatttggcatactccagagggcatctcaatcaaaccactgtattcaaaacgggacacgatggacctacccgaagagttaccaggagtgaagccgttcaccaggggaccatatcccacgatgtacaccttccggccatggacaattcgccagtatgccggtttctctaccgtcgaagaatcaaataagttttataaggataacatcaaggccggccagcagggactgtctgtggcctttgatcttgcaactcaccgcggctacgattcagataatccccgcgtgcggggtgacgttggtatggctggcgtggcgatcgatacagttgaggacaccaagatcctgttcgacggaatccctctggaaaaaatgagcgtctcaatgacgatgaatggtgccgtgatcccagtgctggccaacttcattgtcacaggcgaggaacagggtgttccgaaagagaagctgacaggcaccatccagaatgatatcctgaaagagtttatggtgagaaatacttatatcttccctccagaacccagcatgaagattattgccgatattttcgaatacacagccaaacacatgccaaaattcaattcgatctctatctcaggttatcacatgcaggaggcgggggctgatgccatcctggaactggcatacactttagccgacggattggagtactccaggactggcctgcaagcaggactaactattgatgagtttgccccaaggttgagctttttttggggcattgggatgaacttttacatggagatcgcaaagatgagagctggcagaagactatgggcccatctgatcgagaaaatgtttcagccgaaaaactcaaagagcttactgttgcgagcgcattgccagacatccggctggtcattgacagaacaagacccctataacaacatcgtgcggacggccattgaggccatggcggccgtgtttggagggacacaaagcttgcacaccaacagtttcgacgaggccctgggcctccccacagtgaaatcagcgcgaatagccaggaatacccaaatcatcatccaggaagaatctggtatcccgaaggtggcggacccctggggcggatcctacatgatggagtgtcttaccaacgatgtgtacgatgcagccctgaaactcatcaatgaaatcgaagagatgggaggcatggccaaggccgtggccgaagggatcccgaaattgaggatcgaggagtgcgccgctagacgccaggcgcgcatcgactccgggtccgaagtcatagttggcgtcaataaataccagctggaaaaagaagatgccgtagaggttttagcaattgacaataccagtgtgaggaaccgccagattgagaagttgaaaaagatcaaaagctcgcgagatcaggcccttgccgagcgctgcctagctgccctcactgagtgcgccgcttcaggcgacggcaacattctggctctcgctgtcgacgccagtcgagctagatgcaccgtcggtgagatcactgacgccttgaagaaggtgttcggggaacacaaggcaaatgaccgcatggtttcaggggcttacagacaggagtttggggagtctaaagaaattaccagtgccataaaacgcgtccacaaattcatggaaagagagggaagacggcctcggctgttagtggcgaaaatgggccaggacgggcatgaccggggcgccaaagtgattgctaccggttttgcggacctgggctttgatgttgacataggacctctgttccagactccccgcgaggtcgcacagcaggccgtagacgccgacgtacacgcagtcggtgtgagcacattggctgccggccacaagaccctggttcccgagttgatcaaagagctgaacagtttgggtcgacctgatatcctcgttatgtgtgggggggtgatacccccccaggactacgaatttttgttcgaggttggggtcagcaatgtgttcgggccgggcacaaggatccccaaggcagccgtacaggttctcgacgatatcgaaaaatgtctcgaaaagaaacaacagtctgtg

SEQ ID NO: 69 - DNA, 2250 bp, Artificial Sequence
  Codon optimized sequence that encodes an MCM polypeptide with the I671V mutation
atgctgagagccaaaaaccaactgtttctgctctctcctcattatctgcgccaggtcaaagagtcatctggaagcaggttaattcagcagaggctgctgcaccagcagcagccccttcatccagagtgggctgctctggctaagaaacagctgaagggtaagaatccggaagacttgatctggcacaccccagagggcataagcattaagcctctttatagtaagcgtgatacaatggacttacctgaagaactacccggtgtgaagccatttacaagaggcccgtatcctacaatgtatacatttcgcccgtggaccatcaggcagtacgcgggcttcagcaccgtagaagagtcaaacaaattttataaggataatattaaagccggacagcaagggttgtccgtggcgtttgacttggcaacacaccgcggctacgactcagacaaccctagggtcagaggcgacgtaggcatggccggggtggccatcgacacggtcgaggacacaaagatcctgttcgatggcattcccctggagaagatgagtgtctctatgacaatgaacggggccgtgattcccgtgctcgcaaactttatcgtgacaggggaggagcagggagtacccaaagagaagctcaccggtaccatacaaaacgatattctgaaggagtttatggtaaggaacacgtatatctttccaccagaaccatccatgaagattattgctgatatttttgaatacactgcaaaacacatgcccaagttcaatagcatctcaataagtggctatcatatgcaagaggctggcgcagacgccattctggaactcgcctataccttggccgacggtttggagtactcccgcaccgggctccaggctggcctgaccattgacgagtttgcgcccaggcttagttttttctggggtattggaatgaatttttacatggagatcgccaagatgagggcaggcaggagactctgggcgcatctgatagagaagatgttccagcctaaaaattccaagtccctgctgctgagagcccattgccaaaccagcggttggtctctgactgaacaggacccgtataataatatcgtgagaacagctatcgaagctatggcagccgtcttcggaggaacacaatctttgcacacgaatagcttcgacgaggcactgggattgcccactgtgaagagcgcccggattgcacgaaacacccaaatcataatccaggaggagtctggcatcccgaaggttgccgacccttggggcgggtcctacatgatggagtgcctgacgaacgatgtgtatgatgctgccctcaagttaataaacgagatcgaggagatgggtggcatggccaaagccgtggctgagggaattcctaaactgcggattgaagagtgcgcagcacggagacaggcccgaattgactctggatctgaagtgatcgtcggagtcaataagtaccagctggagaaagaagatgctgtggaagtcctggccatagacaacaccagcgtccggaatagacagatcgagaaactgaaaaaaataaagagtagcagagatcaggctcttgctgagcggtgtttagccgctctgaccgagtgcgcagcgagcggcgatggaaatattctggctctcgctgtagatgcttcaagagcaaggtgcactgtgggcgagatcactgacgcgttaaagaaggtcttcggcgagcacaaagcgaatgacagaatggtgtccggcgcatatcggcaagagtttggagagtctaaggagataacgagcgcaataaaacgggttcacaaatttatggaaagagaaggccgccgcccacgtctgctggtagcaaagatgggccaggatggccatgaccgcggcgcaaaagtgattgcaaccgggttcgctgatcttggcttcgatgtggacattgggccactgttccagacacctcgggaagtggctcagcaagcagttgatgcagacgttcacgcagtcggtgtgtccacgctcgccgccggacataagactctcgtgcccgaactgatcaaagaactaaattccttgggcaggccagacatcctggtgatgtgtggcggcgtaattcctccccaggattacgagtttctcttcgaggtgggcgtgtccaatgtcttcggcccagggacgcgtatccctaaggctgccgttcaggttctcgatgacatcgaaaagtgcctcgagaaaaagcagcagtcagtt

SEQ ID NO: 70 - DNA, 2250 bp, Artificial Sequence
  Codon optimized sequence that encodes an MCM polypeptide with the I671V mutation
atgctgcgggctaagaatcaactgtttctgctgtcaccacattacttgaggcaggttaaggaatctagcggaagcaggttaatacagcagaggttattgcaccagcaacaacccttgcatcccgagtgggccgcgttagccaaaaagcagcttaagggcaaaaatcccgaggacctgatctggcatacaccagagggcattagtataaagccactctattctaaaagagatacaatggacctcccagaggagctgcctggagtcaagccctttactcggggcccgtatcccaccatgtatacattccggccctggaccatccggcaatatgccggattcagtactgtggaagaatcgaacaaattctataaggataacatcaaggccgggcaacagggactgagcgtggcattcgacttagctacccacagaggctacgacagcgataatccaagagtccggggcgatgtgggtatggcaggcgtggccatcgacactgtcgaggacactaaaatcctcttcgatggaatacccctcgagaagatgtcagtgtccatgactatgaacggcgcggtgatcccggtgctggctaactttatcgtgacgggggaggagcagggcgtgcctaaggagaaattgaccgggaccatccaaaatgacattctaaaagagttcatggttagaaatacctacattttcccccctgagcccagcatgaagataattgccgatatttttgagtatactgccaaacacatgccaaaatttaactcaatcagcatttcagggtatcatatgcaggaggccggcgctgatgcaatcttagaacttgcttatactctggctgacggcctggagtatagtcgaactggactacaggctggattaactattgacgaatttgctccacgcctgagcttcttttggggcattggcatgaacttctacatggagattgccaaaatgagagcaggacggcgactgtgggcacaccttatagagaaaatgttccagcccaagaattccaaatcgctactgcttagagcgcactgtcagacctccggatggtcgctgaccgaacaggacccgtacaataatattgtgaggactgccatcgaggccatggcggctgtctttggggggacgcaatcgctacatacgaattctttcgacgaagctctcggcctgccaacagttaaatcagctcgcatcgccagaaacacccagatcatcattcaggaggaaagcgggattcccaaggtggctgacccttggggaggatcatatatgatggagtgtctgaccaatgacgtatacgacgctgcacttaagctcatcaatgagattgaggagatgggcggcatggctaaagctgtagccgaagggattccaaaactgaggatcgaagagtgcgccgcaaggcgacaagcacgtatagattctggtagtgaggttatcgtgggcgtgaataagtaccagctggagaaggaggatgccgttgaggttctggccattgacaacacgtctgtacgcaatagacagattgagaaacttaagaaaatcaagagcagtagagatcaggctctggctgagcgctgtctggcggcactcactgagtgtgcggcctccggtgacggcaatatactggcactggcggtggatgcgagcagggcacggtgcaccgttggagaaattacggacgccctcaaaaaggtgttcggcgaacataaggcgaatgatcggatggtgagcggtgcctaccggcaggagttcggcgagagcaaggagatcacgtccgccattaagagagtccataaattcatggaacgagagggccgccggccaagactgctggtggctaagatgggacaggacggacacgaccgtggggctaaggtcattgccacagggtttgccgatcttggcttcgatgtggatatcggccctttattccaaacacctcgggaggtggcccagcaagcagtggatgctgatgtacatgccgtgggtgtgtctacgcttgccgccggccataagaccctggtccctgagttaattaaagaactgaatagtctgggcagacctgatatacttgtaatgtgcgggggagtgataccgcctcaggactacgaatttctgttcgaggtcggcgtcagtaatgttttcgggcctggcacacgcattccaaaagccgccgtacaggtcttggatgatattgaaaagtgcctggagaagaagcagcagagcgta

SEQ ID NO: 71 - DNA, 2250 bp, Artificial Sequence
  Codon optimized sequence that encodes an MCM polypeptide with the I671V mutation
atgctgcgtgccaagaaccaattgtttcttctgagcccccactatctcagacaggtgaaagagagctcggggtcacggctgatccagcagagactactgcaccagcagcagcccctacaccccgagtgggctgctctggccaagaaacagctgaagggcaagaaccctgaagacctgatctggcacacccctgaaggcatttcaatcaaacccttgtacagcaagcgagatactatggacctgccagaggagctccctggcgttaagccttttacacgggggccctatcccaccatgtacacattccgtccctggaccatcaggcaatatgcaggcttcagcacagttgaggagagcaataagttctacaaagacaacatcaaagccgggcagcagggccttagcgtggcatttgatctggccacccataggggttatgacagcgacaatccccgtgttcgcggcgacgtgggtatggccggcgtagcgattgacacagtcgaggacactaagatcctattcgacggaatcccgctggaaaagatgtctgtgtctatgaccatgaatggggcagtgatccctgtgctcgctaacttcatcgtcaccggggaagaacagggcgtgcccaaagagaagctgaccggaacaattcagaacgatatcctcaaagagttcatggtgcgcaatacctatatttttccccctgaacctagtatgaaaattatagccgatatctttgaatataccgcaaaacatatgcctaagtttaactccatctcaattagcgggtaccacatgcaagaagccggggccgacgctatcttggagctggcatataccttggccgacggactggaatattctcggaccgggcttcaggccggtcttaccattgacgagtttgcaccaagactctcatttttctggggcatagggatgaacttctacatggagatagctaaaatgagagccgggcgacgcctatgggcccaccttattgaaaaaatgtttcagcctaagaattctaaatccttgctgttgcgggcccactgccagacgagcgggtggagcctgacggagcaggacccctataacaacatcgtgaggacagcaatagaggccatggccgcagtgttcgggggcacccaaagcctgcacacaaactcctttgatgaggcactcggtctccccacagtcaaaagcgcgcggatcgccagaaatacccagataattattcaggaagagtcgggtattccaaaagtggcagacccgtggggagggtcttatatgatggaatgcctgactaacgatgtgtatgacgcagccttgaagctgataaatgaaatagaggagatgggtggaatggcaaaagccgtcgcagagggtattcccaagctccggattgaagagtgtgccgcacgcaggcaggctagaatagactctgggtctgaggtcatcgtgggagtcaataaataccagctggaaaaggaagatgccgtggaagtgctagctatcgacaatacaagcgttagaaatagacagatcgaaaagctgaaaaagattaagtccagccgtgaccaggcactggctgagcggtgcctggccgcactgacagagtgcgccgccagcggagatggcaatattctggctctggcagtggatgcatccagggcacggtgcaccgtgggagaaatcaccgacgccctcaagaaggtgttcggagagcataaggccaacgacaggatggtgagtggtgcgtatagacaggaattcggggagagtaaggagatcacctcagccataaagagggtccacaagtttatggagagagaagggagacggccccgactgctcgtcgcgaagatggggcaggacgggcacgatcggggggcaaaggttattgccactggctttgcagacttaggcttcgacgtggacatcggcccacttttccagacaccccgggaagtcgcccagcaagcggtggacgcagacgtgcacgctgtgggcgtcagcacactggctgccggtcacaaaaccctggtaccggagctaataaaagagctcaattcgctgggacgccccgacatccttgtgatgtgtggtggtgttattcctccgcaggactacgaatttttgttcgaagtcggcgtgagcaacgttttcgggccaggtaccagaatccccaaagctgcagtacaggtactggatgatattgagaagtgcctggagaagaaacagcagagcgtg

SEQ ID NO: 72 - DNA, 2250 bp, Artificial Sequence
  Codon optimized sequence that encodes an MCM polypeptide with the I671V mutation
atgctgcgagccaaaaaccaactcttcctgctgagccctcactatcttcggcaagttaaggagagctctggctcccgactgatccagcagagactgctccaccagcaacaaccacttcatccggaatgggccgcgctggccaagaagcagctaaaggggaagaaccccgaggacctgatctggcacactccggaagggattagtatcaaacccttatatagtaagagggatacaatggatcttccggaggagttaccaggagtgaaaccttttacccgcggcccctatcccactatgtacactttcaggccttggacgattaggcaatatgctggattttccacagtggaagaatctaacaagttctataaagataatattaaagcggggcagcagggcctgtcagtggctttcgatttagcgacacaccgcggctacgattcagacaacccgagagttcgaggggatgttggaatggccggagtggccatagacactgtcgaggacactaagattctgtttgatgggatccctcttgagaaaatgtctgtgagtatgacaatgaatggagctgtgatccctgtgctggcgaacttcatcgtcactggcgaagaacagggtgtacctaaagagaagctgacgggcactatccagaacgatatactgaaggagtttatggtgcgcaacacttacatcttcccaccagagccctctatgaagatcatcgccgatatctttgagtatacagctaagcatatgcctaaattcaacagtatcagtatatctggatatcacatgcaggaagccggtgccgacgcgattcttgagctggcctacaccctggccgacgggctcgagtacagcagaacgggtctgcaagcaggactgactatagacgaattcgccccccgattatcattcttctggggtattgggatgaatttttacatggaaatagctaagatgagagctggtcggaggctgtgggcgcacttgatcgagaagatgtttcagccaaaaaattctaagtctctcttgttgcgcgcgcactgtcagacttcaggatggagcctgaccgagcaggatccttacaataatatcgttcgcacagcaatcgaggcgatggctgctgtgttcgggggcacccaatccttgcacaccaattccttcgatgaagctcttgggctgccaaccgtcaaaagcgctcggattgctaggaacacacagattatcatacaagaagagtcgggcatccctaaagttgccgatccgtggggtgggtcttacatgatggagtgtctgaccaatgacgtctacgatgccgcactgaaactgatcaacgaaatcgaggaaatgggggggatggcaaaagcggtagctgagggcatccccaaattgcgtatcgaggagtgcgccgcaaggagacaggccagaattgattcaggaagcgaagtaatagtaggcgtcaataagtaccaattggaaaaggaggacgcggtcgaagtgctggctattgacaacacctccgtgaggaatcgccaaatagagaaactcaaaaagatcaaatcttccagggatcaggccctggccgagcgctgtctcgccgctttgaccgaatgcgccgcttccggcgacggtaacatcttagcgcttgccgtggacgcatctcgcgctcgatgcacggtgggcgaaataaccgatgcattgaagaaggtctttggcgagcacaaggcaaacgatcggatggtgtctggtgcctatcgtcaggagtttggcgaatccaaggaaattacctctgctataaagcgagtacacaagtttatggagcgggagggccgccggccccgactgctggttgcgaagatgggacaagatgggcatgatcgcggcgctaaagtgattgcaactggcttcgcagacctgggcttcgatgttgatataggtccactcttccagacaccacgcgaagttgctcagcaggcagtggacgctgatgtccatgccgtgggggttagtacattagctgctgggcataagacccttgtcccggaattaattaaggaactgaacagcctggggaggcctgacatcctggtcatgtgcggcggggtgatccccccccaggactacgagtttctgttcgaagtgggagttagtaatgttttcggacccgggacccgcattcctaaagcagcagtccaggttctggatgatattgagaagtgtctggagaaaaaacagcagtccgtc

SEQ ID NO: 73 - DNA, 2250 bp, Artificial Sequence
  Codon optimized sequence that encodes an MCM polypeptide with the I671V mutation
atgctgagagcaaaaaaccagctcttcctgctgtcgccccattatctgcgacaggtcaaggagtcgagcggcagtaggctcatccaacagcgcctgctgcatcaacagcaaccccttcaccctgagtgggcagccctggccaagaagcagctcaaaggcaagaaccctgaggatctgatttggcatacacctgagggtatttctattaaaccactgtactcaaaaagagacacaatggatctccccgaagagcttcccggagtgaagccttttactaggggaccttacccaacgatgtatacgttcagaccctggacaattcgtcaatatgcaggattctccacggtggaagaatcgaacaaattttacaaagataacatcaaagcgggacagcaggggctcagcgtggcgttcgatctagcgacccatcgcggatacgactcggacaaccccagggttcggggggacgtgggcatggccggcgtggccatagatacagtcgaggacaccaaaattctgtttgacggcatccccctggaaaaaatgagtgtttcaatgacgatgaacggggccgtcatccccgtactggcaaacttcatagtgacaggggaagagcagggcgtgccaaaggagaagctcacagggaccatccaaaatgacattctaaaagagttcatggttcgaaacacctacatcttcccccccgagccttctatgaagattatagctgatatctttgagtacactgcgaagcacatgccaaaattcaactctatctctatcagtggataccatatgcaggaggcaggtgctgatgccatcttagaattagcctacaccttggctgacgggctcgagtacagccgaaccggcctgcaggctggactcacaattgatgaattcgctcctagactcagcttcttctggggaattggcatgaatttctatatggagatcgcgaagatgcgagctggccgcaggctctgggcccatctcatagaaaagatgtttcaacctaaaaatagcaagtcactgttattgcgcgcccactgtcagacgtccggctggagcctgacggagcaggacccatacaacaatattgtcagaacagcaatcgaagctatggcagctgtgttcggtgggacacaatctctgcatactaatagttttgacgaggcgctcgggttgcccacggtcaaatctgccagaatagcgcgcaacacccagatcattatccaggaagagagcggtattcctaaagtagccgacccttgggggggcagctacatgatggagtgtctgaccaacgacgtttacgatgctgctctgaaattgatcaatgaaatcgaagagatgggcggaatggctaaggctgtcgctgaagggattcctaaattgagaattgaggagtgtgcagccaggcgtcaggcccggatcgactctgggtctgaggtcattgtgggcgtcaataaatatcagttggagaaggaggacgccgtagaagttctggcaatcgataacaccagtgttagaaacaggcagatcgaaaaattgaaaaagattaagtcatcacgagatcaggccttggcagaacgttgccttgctgctttaaccgaatgtgccgcctcgggggatgggaatatcctggccctcgcggtagacgcatccagagcacgctgcaccgttggtgaaatcacagatgcgctgaagaaagtgtttggcgaacataaggcgaacgacagaatggtgagcggagcctaccgccaagagttcggcgaatccaaagagattactagcgcgatcaagcgagttcacaagtttatggaacgggagggcagaaggccaagactgctggtcgctaaaatgggccaggatgggcatgaccgtggcgctaaggtgatagctaccggctttgcagaccttggattcgatgtggacataggtcctctgtttcagactcccagagaggtggctcaacaggcagttgatgctgacgttcacgccgtgggcgtatcaaccttagccgccgggcacaaaacactcgtccccgaattgatcaaggaattgaattccctaggcagaccggacatcttggtgatgtgtggcggcgtgattcccccacaggactatgaattcctcttcgaagttggagtttccaacgtgttcggaccaggaacccgtattcctaaggcagctgtacaggtcctggatgacattgagaaatgcctggaaaagaaacagcaaagcgtc

SEQ ID NO: 74 - DNA, 2250 bp, Artificial Sequence
  Codon optimized sequence that encodes an MCM polypeptide with the I671V mutation
atgttgcgggcgaagaaccagctcttcttattgtccccgcactacctccgacaagtaaaagaatcctctggctcaaggctgattcaacagcgattgctccaccagcagcaacctttacatcccgaatgggctgctctggccaagaagcagctgaagggaaaaaaccctgaagacctgatctggcatacaccggaggggatttccattaagccgctctattcgaaacgagacacgatggatctgcctgaggagctgcctggggtcaaaccatttaccagggggccgtaccccacgatgtatactttccggccctggaccataagacaatacgccggcttctccaccgtggaagagtccaacaaattttataaggataacattaaggcgggacaacagggtctgtccgtggcatttgacctcgccacacatcgcggctacgattctgacaatccacgcgttcgcggggacgtgggcatggcaggcgtcgcaatcgacaccgtggaagataccaaaatcttgtttgacggcattccgttggagaagatgtctgtcagcatgaccatgaacggagcggtgattcccgtcctcgccaacttcatcgttacaggcgaggaacagggtgtccccaaggaaaaactgactggcaccatccagaatgacattctaaaggaatttatggtccgcaatacctacatcttcccacctgaaccgtccatgaagatcatcgccgatattttcgagtataccgccaaacatatgcctaaattcaacagcataagtatttcaggataccatatgcaagaggctggtgccgacgcgattctggaacttgcttacactctggcggacggcttggagtattctcgcaccggtctccaggcgggcctgacaattgatgagtttgccccaaggctgtcgtttttctggggtatcggtatgaacttctatatggagatcgcgaagatgagggccgggcggcgcctatgggcacacctgatcgaaaaaatgtttcagcccaagaatagcaaatcactgctgctacgggcccattgtcagacgtctggatggtccctcaccgaacaggacccctacaataacatagtgcgtaccgccattgaagcgatggctgccgttttcggaggcacccagtcccttcacacaaactccttcgatgaagccctgggcctccctacagtcaagtctgcccgcattgcacgcaatactcagatcattattcaggaagagtcaggaatccccaaggttgcagacccatggggtggcagttatatgatggagtgtcttacaaatgacgtctacgatgctgctctgaagctaatcaatgagattgaggagatgggagggatggccaaggcagtcgccgaggggattcccaaactcagaatcgaagagtgcgcagcaaggagacaggcccggattgattccgggtccgaagtgatcgttggtgtgaataagtatcaactcgaaaaagaggatgctgtggaggtcctggccatcgacaacacctccgtcaggaatagacagatcgaaaaattgaagaagatcaagtcatctcgcgaccaagccctggcagagagatgcttagcagccctaaccgagtgtgcagcctctggggacgggaacatcttggctcttgctgtggatgctagcagggcacgatgcaccgtgggggagatcacagatgccttgaagaaagtgttcggcgagcacaaagccaatgaccgaatggtaagcggggcttatagacaagaatttggggaatctaaagagataacctcggccatcaagcgcgtccataagttcatggagcgggagggacgcaggccccggctgctcgtagccaaaatgggtcaggacgggcacgataggggagctaaggtgatcgcgaccggctttgctgatcttggcttcgacgtcgacatcggaccactgtttcagactcctagagaagttgctcaacaggccgtagacgccgatgttcacgccgtgggggtgagcacactggctgccgggcataaaacactcgtgccggagctcatcaaagaacttaactcgcttggaagacccgatatcctagtgatgtgcgggggtgtaattcccccgcaggactacgagtttcttttcgaggttggagttagcaatgtgtttggacccggtacccggatccctaaagctgcggtgcaggttctggacgacattgagaagtgtctcgagaagaaacagcaaagcgta

SEQ ID NO: 75 - DNA, 2250 bp, Artificial Sequence
  Codon optimized sequence that encodes an MCM polypeptide with the I671V mutation
atgctgcgcgccaagaaccagttgttcctgctttctccacactacctgagacaggtcaaggagagcagcggatctagactcatccaacagagactgcttcaccagcagcagccgcttcatcctgagtgggccgcccttgccaagaagcaattaaaaggaaagaaccccgaggatcttatctggcatacgcctgaaggtatttcaatcaagcctctctatagcaaaagagacacaatggatctccccgaggagctgccaggggtgaaaccttttacgagagggccctatccaacaatgtatacattcaggccatggaccattcggcagtatgcaggcttttccactgtggaagagagcaataaattttacaaagacaacattaaggcgggccagcagggtttaagtgtggccttcgatttagccactcatcgcgggtacgattcagacaatcccagagtgcggggggacgtaggcatggcgggtgtcgcaattgacaccgtagaggacacaaaaattcttttcgacgggattccccttgagaaaatgagtgttagcatgactatgaacggggctgtcattccagtgctggcgaattttattgtgaccggcgaggagcagggggtacccaaggagaaactgacaggtaccatacagaacgacattttgaaagagttcatggtgcgcaacacatatatattccctcctgaaccatctatgaagattatcgcggacattttcgagtacaccgcaaagcatatgcccaagttcaactcaatctctatttctggctatcacatgcaggaagcaggggctgatgcgatactggagctggcctacacactggccgacgggcttgaatactcccggaccgggttgcaagcaggactaacgattgatgaatttgcgccgagactatctttcttttggggaattggtatgaatttctacatggagatcgccaagatgcgcgcgggcagacgcctctgggcccacctgatagagaaaatgttccaaccaaagaatagtaagtccctgctgttgagggcccactgtcagacctccggatggagtctgaccgagcaggacccatataacaacattgtgagaaccgcaatagaagccatggccgcagtcttcggtggcacacaatccctgcataccaactcttttgacgaagctttaggtctaccaaccgtcaagtctgctcgcatcgccaggaacactcaaataatcatccaggaagagtcgggaattcctaaagtggccgacccgtggggtgggtcatacatgatggaatgcctcaccaatgatgtgtatgacgctgctcttaaactgataaacgagatcgaggaaatgggcggaatggctaaagccgtggcggaaggtataccgaaactcaggatcgaagaatgtgcagctcggcggcaggctaggatcgactctggctcagaggtgatcgttggagtgaacaagtatcagctagagaaggaagatgctgtcgaagtgctcgcaattgacaacacaagcgtacgtaatagacagatcgaaaaactcaaaaaaatcaaaagctctcgagaccaggctctcgccgaaagatgcctcgctgcactcaccgaatgcgctgcctcaggagatggtaatatactggcgcttgctgtggacgcatctcgcgctaggtgcactgtgggggaaattacagatgccctgaagaaagtgttcggcgagcataaggcgaatgacagaatggtaagtggcgcgtatcggcaggaatttggagaatctaaggagattacatcagcaattaaacgcgtccataagttcatggaaagggagggaaggcgcccaagactcctggtggcaaaaatgggccaagacgggcacgatcgaggcgctaaagtgattgccaccgggtttgctgatcttggctttgatgttgacataggccctctgtttcaaaccccgcgcgaggttgctcagcaggctgtcgacgcagacgttcacgctgtcggcgtatccactctcgctgccggtcacaaaactctggtccccgagttgataaaggaactgaactccctcggaagaccagacatactggtgatgtgtgggggcgtcattccaccacaggattatgagtttctgtttgaagtgggtgtgtctaacgttttcggacccggaaccaggataccgaaggccgccgttcaagtattggacgacattgagaaatgtctggaaaaaaagcaacaaagcgtt

SEQ ID NO: 76 - DNA, 2250 bp, Artificial Sequence
  Codon optimized sequence that encodes an MCM polypeptide with the I671V mutation
atgctgagggcaaaaaatcaactgttcctgttgagcccccactatttgcgtcaagtgaaagaaagctccggctcccgcttaatccaacagcggttgcttcatcaacagcaacccttgcaccccgaatgggccgcccttgctaagaaacagctgaaggggaaaaacccagaagacctgatttggcacacccccgaagggattagtattaaacctctttacagcaagagggacacaatggatttacctgaagagcttcctggggtcaagccttttaccaggggaccatatccaacaatgtacacttttaggccatggacaattcgacaatatgctgggttcagcactgtggaggagtctaataagttctacaaagataacattaaagcaggacagcaaggactcagtgtcgcattcgatttagctacccatcgaggctacgactccgacaatccaagagttcgcggcgacgtaggcatggccggtgtcgcgatcgacactgtagaagataccaagatactgttcgacgggattccattggaaaaaatgtcagtcagcatgacaatgaacggcgccgtgattcccgtgcttgcaaactttattgttacgggtgaggaacagggagttcccaaagagaaactgacgggcacaattcagaatgatatcttgaaagagttcatggtaagaaatacatatatctttccaccagaaccctctatgaaaattatagcggacatttttgagtacaccgctaagcatatgcctaagtttaattctatctccatcagcgggtaccacatgcaggaggccggagccgacgccatcctcgaattggcctacacgctggcagacggattggaatattcccgaaccggactccaagctggcctcacaatagatgagttcgctccccgcctttcatttttttggggtatcggaatgaatttttacatggagatcgccaaaatgagggccggtagacggctgtgggctcatctgatcgaaaagatgttccagcctaagaatagcaagtctctccttttacgggcacactgtcagacgagtggatggagtttgacagagcaggatccctacaacaacatcgtgcgaaccgccattgaggccatggccgccgtgttcgggggaacccagagcttgcataccaactcctttgacgaagctctgggcctgcccacagtgaagagcgcccgcatagcacgcaacacacagattataatccaggaagagtcaggcattcctaaggtcgcagatccctggggtggttcttatatgatggaatgtctgacaaacgacgtctacgacgctgccctaaagttgatcaacgagatcgaggagatggggggcatggcaaaggcagtcgccgaggggatccctaagctgagaatcgaagagtgcgccgcacggaggcaggcccgaattgactcagggtctgaagtgattgtgggcgtaaacaaataccaattggagaaggaagacgctgtagaagtgcttgctatcgataataccagcgtgcgcaaccggcagatcgaaaagctgaaaaaaattaaatcttcgcgtgaccaggctctggcagagcgatgtctcgctgcgcttacagaatgcgccgccagcggagatggaaatatcctggcactggccgtcgacgccagtagggcccggtgcacggtgggagaaatcacagacgctctgaagaaggtttttggagagcacaaggcgaatgatagaatggtctcaggcgcttaccgtcaagagttcggtgagtccaaggagatcacctccgccattaaacgagtccacaagttcatggaacgagaaggccgtcgtccccgactgctggtcgccaagatggggcaggacggacacgaccgcggtgccaaggttatcgccacaggcttcgccgacctggggtttgatgtggatatcggacccctgttccagactccgagggaagttgctcaacaagcagtggatgctgacgttcatgccgttggtgtgtcgactctcgcagcggggcacaaaacgttggtgcccgaactgataaaggagctgaattcgttgggacggccggacattttggtaatgtgcggcggcgtgattccccctcaggattacgagtttctcttcgaggtgggtgtcagtaacgtgtttgggccgggaactagaattcccaaagcagctgtgcaggtgctggatgatatcgagaaatgccttgaaaaaaagcagcagagcgtg

SEQ ID NO: 77 - DNA, 2250 bp, Artificial Sequence
  Codon optimized sequence that encodes an MCM polypeptide with the I671V mutation
atgcttagggcaaagaaccagctgttccttctgtccccccactatcttagacaggtaaaggagagctcggggtcacggctgatccagcagaggctcctgcaccaacagcagcctctgcacccagaatgggccgccctggccaaaaagcaactgaagggcaaaaatccggaagacctgatttggcacacccccgagggtattagcataaaacccttgtacagcaaaagagataccatggacttaccagaagagttaccgggcgtgaaaccgttcacccggggaccctatcccacaatgtacaccttccgtccatggacaatccgccagtatgccggattcagcaccgtagaggagagcaacaagttttataaagacaatatcaaggccggccaacagggactctctgttgcgttcgaccttgccacccaccggggctacgactcggacaaccctagggtccgaggtgatgttggcatggctggtgtggccatcgacacggttgaagataccaagatcctgttcgatggaatacctctcgagaagatgtctgtttcaatgacgatgaacggcgcggttatcccggtgttggccaatttcattgtgaccggtgaggaacaaggggtccccaaggaaaagttaacaggcacaatccaaaatgatatcctcaaagaattcatggtgcgcaatacctacatctttccgccagaaccttcaatgaaaattatcgcagacatctttgaatacaccgccaagcacatgcctaagttcaattctatatcaattagtgggtatcacatgcaggaagccggtgcagacgctatattagagcttgcctacaccctcgccgatggcctggagtattctcgcacgggtttgcaggccggcctgacaattgacgagtttgcccctagactaagctttttctggggaatcgggatgaatttctacatggagatagcgaaaatgcgggctggaagacggctctgggcccacctcatcgaaaagatgttccagccaaaaaattcgaagtctcttttactgagagcacattgtcagactagtgggtggagtctgaccgagcaggatccgtacaacaacatcgtgagaactgccattgaagctatggccgcagtgtttgggggtacccagtcccttcacaccaattcctttgacgaggctctcggcctgccaactgtgaagtctgccaggatcgctcgaaatactcaaattatcattcaggaggagagcggaattcccaaggtggccgatccatggggaggttcgtacatgatggaatgtctgactaacgacgtctacgatgccgccctcaagctgattaacgagatagaagaaatgggaggtatggcaaaggcagttgctgaaggcatacctaagcttaggattgaagagtgcgcagcaagacggcaggctagaatagatagcggaagtgaagtgatcgttggggtgaacaaataccagctcgaaaaagaagatgccgttgaagtgctggcaattgacaataccagtgtccgaaataggcaaattgagaaacttaaaaagatcaagtcctctcgggatcaggccctggccgagcgatgtctggcggctctcacagagtgtgccgcatccggagacgggaacatccttgctctggctgttgatgccagcagggccagatgtactgtaggggagatcactgacgcccttaagaaggtcttcggggaacataaggctaatgacaggatggtctcaggagcctatcgacaagagtttggagagtctaaggagataaccagtgctatcaagagagttcacaaatttatggagagggaaggtcgccgccctaggcttctggtggccaaaatgggacaggatgggcacgatcggggcgctaaggtgattgctaccgggtttgccgatctgggttttgatgtcgatatcgggcccctcttccaaacaccaagggaggttgcccagcaagccgttgacgccgatgtgcatgccgtaggagtttcaactctggctgcaggacacaaaaccctcgtccccgagctcatcaaggagttgaattctttaggccggcctgacattctcgtgatgtgtgggggagtgattccgcctcaggactacgagttcctgtttgaagtgggtgtctccaatgtctttggacccggaacccggatacctaaggccgcagtgcaagtgctagacgacatagaaaagtgtttagaaaagaagcagcagtctgtc

SEQ ID NO: 78 - DNA, 2250 bp, Artificial Sequence
  Codon optimized sequence that encodes an MCM polypeptide with the I671V mutation
atgctaagagcaaaaaatcagctcttcctactgtccccacactacctgaggcaggttaaggagtcttcaggctctagactcattcaacagcgcctcctccatcaacaacagccccttcatcctgagtgggccgcattggcgaaaaagcagctcaaaggaaaaaatccagaggacctgatctggcacacaccagagggcatttcgattaagcccctatattctaaacgtgataccatggatctgccagaagagctccctggagttaagccatttacacgggggccctacccaacgatgtatactttccggccctggacaatcagacaatacgctggtttctcaactgtggaagagagcaataaattttacaaagacaacatcaaagctgggcagcaggggctgtccgtggcctttgatctggctacgcaccgaggatacgatagtgacaacccccgggtgcggggagatgtcggcatggccggggttgctatcgacaccgtggaggatacaaaaattctgttcgatggcatcccgctggagaagatgagtgtctctatgaccatgaacggagccgttatccctgtgctcgccaatttcatcgtcaccggagaagaacagggcgttcccaaagagaagctgaccggaactatccaaaatgatatcctgaaagaattcatggtccggaatacatatatctttcctcctgagccatccatgaagatcattgccgacatcttcgagtacacagcaaaacatatgccaaagtttaattcgattagcatctcggggtaccatatgcaggaagcaggtgccgatgctattcttgaacttgcctatacccttgcagatggcctggaatactctcgtaccggcctccaagctggcctgactatagacgagttcgcacccagactctcttttttctggggaataggaatgaacttttatatggagatcgccaaaatgcgtgcgggacgccgcctctgggcacatctgatcgagaaaatgttccaacccaaaaactccaaatctttgctgctgagagctcactgccaaacctccggctggagtctgactgaacaagacccctacaataacattgttcgtaccgctatcgaggcaatggcagcagtgtttgggggtacccaatcgctgcatacgaacagcttcgatgaagctttgggccttccaacagtaaagagtgcgcgtatagcgcgaaacacccaaattattatccaggaggagtccggcattccaaaagtcgctgatccctgggggggcagctatatgatggaatgcctgactaatgacgtttacgatgctgcgctgaaattgattaacgaaatcgaagaaatgggaggaatggcaaaggcagtcgctgagggcatcccaaagcttagaattgaagaatgtgcagctcggcgccaggctaggattgacagcggtagtgaagtcattgttggagtgaacaaatatcagctcgaaaaggaggatgcagtggaggtgctggcaatcgacaacacttcagtgaggaaccggcagatcgagaaactaaaaaagataaagagcagccgcgaccaggcattggccgaacgctgtctggccgcgctgaccgagtgtgctgccagtggtgatgggaacattttagcactggccgttgacgcttcaagggctcgatgcactgtgggcgagattacagatgcactaaaaaaagtcttcggcgaacacaaagcgaatgatcgtatggtcagcggggcctacaggcaggagtttggagaaagcaaggaaattacatctgccatcaagagggtgcataaattcatggagagggaagggaggaggcctagactgctggtcgccaagatgggccaagatggtcatgatcggggggcaaaagtgatcgccaccggctttgctgacttgggcttcgatgtggacattggacccctgtttcagacaccgcgcgaggttgcgcagcaagccgtggacgcagatgtgcacgctgtcggggtgagtacactggctgccggccacaagaccctggtgccagagttaattaaggaactcaatagcctcggacgtccagacattctcgtcatgtgcggtggggtaattcccccacaggactatgagtttcttttcgaggttggcgtatcaaatgtttttgggcctggtacacgaatacccaaagcggcagtccaggtgctggatgatatcgagaagtgccttgagaaaaaacagcagtctgtc

SEQ ID NO: 79 - DNA, 2250 bp, Artificial Sequence
  Codon optimized sequence that encodes an MCM polypeptide with the I671V mutation
atgcttagggcgaaaaaccagttgttcctcctatcaccccactatctcaggcaggttaaggagagctctggctcacgcctcatccaacagagactgttgcatcagcagcaaccactgcatcctgagtgggccgccctcgctaagaagcagcttaaaggaaagaatcctgaggacctgatttggcacacccctgaaggcatcagcatcaaaccgctgtattctaagagagacaccatggaccttcctgaggaactgcccggcgtgaaaccctttacacgcgggccctaccccactatgtacacattccgaccctggactatcagacagtacgcaggcttcagcaccgtggaggaaagcaataaattctacaaggacaatatcaaggcgggtcagcagggcctgtcagtggcatttgacctggcgacacacaggggatacgattcggataacccccgggttagaggtgacgttgggatggcgggggtggccatcgacacagtcgaagatacaaaaatcctgtttgacggtataccattagaaaaaatgagcgtgagtatgactatgaacggagctgtaatccccgtgctcgcaaacttcatcgtaacaggagaagaacagggagttccgaaggagaagctgacaggcaccatccaaaatgacatccttaaggagtttatggtgcggaacacgtacatattcccacccgagccttctatgaagattattgccgacattttcgaatatacggctaagcatatgcccaaatttaattcaatcagtatttccgggtaccatatgcaggaggccggagctgacgctattctggagctcgcatatacgctggccgatggattagagtactcccggacaggtctgcaggcaggactgacaatcgacgagttcgcacctcgtctgtcttttttttggggaatcggaatgaatttctacatggagatcgccaagatgcgcgccgggagacggctatgggcccacctcatagaaaaaatgttccagccaaagaatagcaagtccttgttactgagggcgcactgtcagacttcagggtggtctctcaccgaacaagacccctataacaacattgtacggaccgcaatcgaagcgatggcagccgtgtttggcggaacgcagtcccttcatacaaatagcttcgatgaagcgctcggcctccccaccgtgaaaagcgcccgtatagcccgtaatacacagatcatcatccaggaagaatcaggaattccaaaagtggctgatccctgggggggttcttacatgatggagtgcctgacaaacgacgtgtatgacgccgctctgaaacttataaatgagatcgaggaaatgggcgggatggccaaggcagtggccgagggtatccccaaactgaggatcgaagaatgtgctgcccgacggcaggctagaattgactctgggtctgaagtgatagtaggtgttaacaaataccagctggagaaggaggacgccgtggaggtcctcgcgattgacaacacctctgtgcgcaatcggcagatcgaaaagctgaaaaaaatcaagagtagtcgcgaccaggctttggccgagaggtgcctagccgcgttaactgagtgtgccgccagcggcgacggaaatattctagcactggccgtggacgcttcccgggccagatgcactgtcggtgaaattactgatgccctgaagaaggtgttcggcgagcataaggcaaacgacagaatggtgagcggagcctacagacaggagtttggggagtcgaaagaaatcacttcagcaatcaaaagagtacacaagttcatggagcgagagggtcgacgtcctcgactcctggttgcgaaaatgggccaagacggtcatgatcggggtgcaaaagtgattgccactgggttcgcagatctcgggttcgacgtggacattggaccattgttccagactcctagggaagtggctcagcaggccgtcgacgcagatgtacatgcagtcggcgtgtctacactggccgccggtcacaagacactggtgccagagctgattaaggagctgaatagcctgggacgaccggacattctcgtcatgtgcggcggtgtgatccccccccaggattacgaattcctgttcgaggtaggggtgagtaatgtattcggaccgggcaccaggattccgaaggccgcggtgcaggtactcgacgacatcgagaaatgtctggagaagaagcaacaatcagtt

SEQ ID NO: 80 - DNA, 2250 bp, Artificial Sequence
  Codon optimized sequence that encodes an MCM polypeptide with the I671V mutation
atgctcagagcgaaaaatcagctgttccttctgagcccacactatctacggcaggttaaagagtcatccggatccagacttatccagcagaggctgctccaccagcagcaaccattgcatcctgagtgggctgcgcttgcaaagaagcagctaaagggcaagaatcccgaagacctcatctggcatacccctgaagggatatctatcaaacccctctatagtaaaagagatacaatggatctccccgaagagttgcccggcgtcaagcctttcactagaggcccctatccgaccatgtacacctttaggccctggactattcgacagtacgccggattttcaaccgttgaggagagcaataagttttataaagataatatcaaggccggtcagcaggggctgtccgtggcctttgacctggccacacaccggggctacgacagtgataatccccgggtaagaggcgacgtgggtatggccggcgtagccattgacaccgtggaggacaccaagattctttttgatggaattcctctagagaagatgagcgtgagtatgaccatgaatggggccgtgattccagttctggcaaatttcattgtgaccggagaggaacagggggtgcctaaggaaaagctcacggggacgatccaaaatgacatactgaaggagttcatggtcaggaatacttacatctttcctcccgaaccttcaatgaagattattgcggatatctttgaatataccgctaaacatatgccaaaattcaactccatctcaatttcggggtaccacatgcaggaggcaggggcagatgccatactggagctcgcctacacactggctgacggcctagagtactctaggactggtttgcaagctgggctcaccattgacgaattcgcgccaaggttgagttttttttggggtatcggcatgaacttttacatggagattgccaagatgcgagccggtcgacgcctttgggcgcatctgatcgagaagatgtttcagccaaaaaacagcaagtccttattacttagagcccactgccagactagcggatggtccctgacagagcaggatccttataacaacattgttcgtactgcgattgaagccatggcagcggtcttcggaggaacccagtctttgcacacaaattctttcgacgaagccctgggcttacctaccgtgaaatctgcacggatcgcccgaaacactcaaatcatcatccaggaggagtctggcatccccaaggtggctgacccttggggagggtcatacatgatggagtgccttactaatgatgtgtacgacgccgccttaaagttgattaacgaaattgaggaaatggggggcatggcaaaagctgttgcagaggggattcccaagctgcggatcgaggagtgtgctgcccgccggcaagcacggattgattcagggtccgaagtaattgtgggcgtcaataagtatcagttagaaaaagaggatgcagtcgaagtcctggctattgacaatacaagcgtgagaaacaggcagatagagaagttgaagaagatcaaatctagcagagaccaggccctggcagaaagatgcctcgcggctctcaccgaatgcgctgcatctggcgacggcaacattctcgccctcgctgtggatgcgagtcgcgcccgttgcacggttggagaaattaccgacgcactgaagaaggtgttcggggagcataaagccaatgaccggatggtgtctggggcgtacagacaggagttcggcgagagcaaagaaatcacttcagccatcaaaagagttcacaagttcatggagagagagggaagacgaccgcggttactggtggctaagatgggacaggatgggcacgaccgaggagcaaaggtcatagcaaccggttttgccgatctggggttcgatgtggacatcggccctctattccagacaccgagagaagtggcacagcaggccgtggatgccgatgtgcacgcggtcggagtgtctacactggccgcgggccacaagactctggtaccagagctgataaaggagctcaattccctgggacggcccgacatcctggtcatgtgtgggggagtgataccccctcaggactacgaatttcttttcgaggtcggcgtttccaacgtctttggacctggtacaagaattccaaaagccgcagtgcaggtgttagatgatatagaaaagtgcttggagaagaaacagcagtccgtg

SEQ ID NO: 81 - DNA, 2250 bp, Artificial Sequence
  Codon optimized sequence that encodes an MCM polypeptide with the I671V mutation
atgctcagagcgaagaatcaactttttctgctttcacctcattacctgcggcaggtgaaggaaagctcaggaagtaggctgattcagcagcgcctcctgcatcagcagcaacccctgcacccagaatgggccgcactggctaagaagcaacttaaaggaaagaatcccgaggacctgatctggcacacccccgaaggaattagtatcaaaccactgtattccaagcgggacaccatggacttgccggaggagctgcctggagttaagccattcacgagaggcccttaccctactatgtatacgttcagaccttggaccatccgacagtacgctggcttttctaccgtggaagagtccaacaagttctacaaagacaacatcaaagccggccagcagggactgagcgttgcctttgacctagcgacacaccggggctacgattctgataatccgcgggtccgtggcgatgtcggaatggccggggtggctattgacacagttgaggacactaagattctttttgacggcatcccacttgaaaaaatgtccgtttctatgactatgaacggggccgtcataccagtcctggcaaatttcatcgtgaccggcgaggaacagggcgtgcctaaagagaagctcactggtacgatccaaaatgacatcctgaaggaatttatggttcggaacacctacatcttccctccggagccctcaatgaaaattatcgctgatatttttgaatacaccgcaaagcatatgcctaaatttaattctatctctattagcgggtatcacatgcaagaagctggcgcagatgcaatcctagagttggcctatactctggctgatggactggaatactctagaaccggtttacaggccggactgacaatcgatgagttcgcccctaggctcagctttttttggggaatcgggatgaatttttatatggagatcgctaagatgagggcaggtcgaaggctatgggcccatctcatcgagaagatgtttcagcctaagaattcaaaatcattgctccttcgtgcccattgtcagacgtctggctggagtcttacggaacaggatccctataataacatcgtgcgcaccgcgattgaagccatggctgcggttttcggcggaacccagtccctccacacaaactcatttgacgaggcgttgggacttcctacggtaaagtccgcccggatagccaggaatacccagatcattatacaggaagaatcagggataccgaaagttgcggacccttggggcggtagttacatgatggagtgtctcacaaacgacgtctatgatgcggccctcaaacttatcaacgaaatagaggaaatgggtggaatggcaaaagccgtggccgaaggaattcctaaattacggatcgaggagtgtgcagcacgacggcaagctcggattgatagtgggtccgaggtgatcgtgggggttaataagtatcagctggaaaaagaagacgccgtagaagtcctcgccatcgacaatacaagcgtgagaaacaggcagatcgagaaactaaaaaagattaaatcaagcagggaccaggcgctggcagaacgctgcctggccgccctcacagagtgtgccgcttcgggggacggcaatattctggccctggcggtcgatgccagccgagcaagatgtaccgtcggggagattacagacgcgttgaaaaaggtgttcggcgagcacaaagctaacgacagaatggtgagcggagcctacagacaagagtttggggagagcaaggagataacatccgcaataaagagggtgcataagtttatggaaagggaggggaggcggccccggctcctggtggccaaaatggggcaggacggtcatgacaggggggccaaagtgatcgcaacggggtttgccgacctggggttcgatgttgacataggtccactttttcagactcccagggaagtggcgcagcaggccgtcgacgcggacgttcacgccgtgggagtgtcaacactggccgctggtcataagactctggtgccagaactcataaaagagctgaactccctcggccgacctgatattctagtgatgtgcggtggcgtaatccccccccaggattatgaattcttgttcgaagtgggagtaagcaacgtgttcgggcctggcacaagaattcctaaagccgctgtccaagttttagatgatattgagaaatgcctagagaaaaagcaacagtccgtg

SEQ ID NO: 82 - DNA, 2250 bp, Artificial Sequence
  Codon optimized sequence that encodes an MCM polypeptide with the I671V mutation
atgttaagggctaaaaaccaattatttttgctgagtccgcattacctcagacaggtgaaagagtctagcggaagtcggcttatccagcaaaggttgctgcaccagcagcagcctctgcaccctgagtgggcagccctggccaaaaaacagcttaagggaaagaatccagaagacttaatctggcacacccccgaaggaatctccataaaaccgctctactccaaacgcgacaccatggatttgccagaggagctcccaggcgtgaagcctttcacaaggggcccttaccccacgatgtacacttttcggccatggacaattagacagtacgctggattttcaactgtggaagagagtaacaaattttataaagataatataaaggccggccaacaggggttgagtgtcgcattcgacttagcaacccaccgaggctatgatagtgacaatccgagagtgaggggtgacgtgggtatggccggtgttgctatcgacactgtcgaagacactaaaattctcttcgacggcattcccctcgagaaaatgtcagtgtctatgacgatgaacggcgctgtgataccagtgctcgccaacttcattgtaacaggcgaggagcagggtgtgcccaaagaaaaactgacaggaaccatacaaaatgatatccttaaggagtttatggtccgaaacacatatatcttcccaccggaaccaagcatgaaaattatcgccgatatattcgaatacacagcgaagcatatgcccaaatttaatagtatctcaatttcgggctatcatatgcaggaggccggggccgacgcaattctcgagctggcttatacactggccgacggtctggagtattctcggactggcctccaggcagggttgactatcgacgaattcgcaccacgcctgtccttcttttggggcatcggaatgaacttctacatggagattgcgaaaatgagagccggccgccgactgtgggcacatcttattgagaagatgtttcagcccaaaaatagcaaaagcctgctgcttcgggcccattgccagactagcggttggtccctcaccgagcaggatccctataataatatcgtgcggaccgccatcgaggccatggccgccgtatttggtggaactcaaagtcttcacacaaattcatttgatgaggcgcttggcctccctacagtgaaaagcgcacgcatagctcgcaatacccagattattatacaggaagaatcaggcattcctaaggtagctgacccctggggaggctcctacatgatggagtgtctcaccaatgacgtctacgacgctgctctgaaactcatcaatgaaattgaggagatgggaggcatggctaaggccgtcgccgaagggattcctaagctacgcattgaggagtgcgccgcccggcgccaggcacggattgactcgggatctgaggttattgtcggtgtgaacaaataccaactggagaaagaagacgctgtggaggttctcgctatcgataacacatcagtcagaaaccgacagatagaaaagctgaaaaaaatcaagtcatccagagaccaggctcttgccgaaaggtgtctggctgctctcacagaatgtgctgcttccggagatggcaatatactggccctggctgtagatgcgagccgggctagatgtaccgtcggggagattacagacgcgctcaagaaggtcttcggcgaacacaaagctaacgacaggatggtaagcggagcctaccgacaggagtttggtgaatcaaaggagattacctccgcgatcaaacgagtccacaaatttatggagagagagggccgcagacctaggctcctcgtggcaaaaatgggccaggatggacatgataggggagccaaagttatcgccactggctttgcagatcttggtttcgacgtggatattgggcctctgtttcagactccaagggaagtggcacagcaggcagtggacgctgatgttcacgcagtgggtgtgtcaacgctggccgccggccataagacccttgtccccgagctaatcaaggagctgaattctctggggaggccagacattctggttatgtgcggaggagtaataccacctcaggattatgagttcctctttgaggtcggcgtcagcaacgtttttggcccgggcacacgaatcccgaaggcagctgtgcaagtattggacgatatagagaagtgcctggagaagaagcagcagtccgtg

SEQ ID NO: 83 - DNA, 2250 bp, Artificial Sequence
  Codon optimized sequence that encodes an MCM polypeptide with the I671V mutation
atgctgagagccaagaatcaattgtttctgctgtcacctcactacctccggcaggtaaaagaaagctcaggctctcgccttattcagcagaggttgctccatcaacaacagccccttcatcctgaatgggctgcactggcaaagaagcaattgaaggggaaaaatcctgaggatttgatctggcacacccccgagggcattagcattaaacccctgtattcaaaacgcgacacgatggatctgccagaggaactgcctggagtaaagccatttactcgcggaccataccctaccatgtatacattccgaccctggacaatccggcaatacgccggttttagcaccgtggaggagagcaacaagttttataaggacaatatcaaggcaggccagcagggcttgagcgtggcctttgatttggccactcacagagggtacgattccgataacccaagggttaggggcgatgtggggatggcaggagtggcgattgatacagtggaggacactaagattctgttcgatgggatacctttggagaaaatgagcgtcagcatgacgatgaacggggcagtgatacctgttcttgccaacttcattgtaaccggggaggaacagggtgttcctaaggagaaactaaccggaacgatacagaatgacattcttaaggaattcatggttcgtaacacttacatctttccacctgagccctcaatgaaaattatagccgacattttcgagtatactgccaagcatatgcccaaattcaattcgattagcatcagcgggtatcacatgcaggaagcgggagctgatgcgatcctggagctcgcctatactcttgctgatgggctggagtactcacgaacagggttgcaggccgggcttactattgacgagttcgcgcctcgattgtcatttttctggggcattggcatgaacttctacatggagatagccaaaatgagagcgggacgcaggttgtgggcccacctgattgagaagatgtttcagcccaaaaatagcaagtctcttttgctacgggcgcactgccaaacaagtggatggtcactgactgagcaggacccatacaacaacatcgtccggactgccatcgaagccatggccgccgtttttggcggcacccagtcgttgcacaccaattcctttgacgaagccttgggccttccaactgtaaagagcgcacggatagctaggaatacgcagattattatccaggaggaatctgggatacccaaagtcgccgacccttggggaggaagttacatgatggagtgcttaacaaatgacgtttatgatgctgccctcaagctcatcaacgagatagaagaaatgggaggaatggcgaaggccgtcgccgaggggattccaaagttgcgtattgaggagtgtgccgccagaagacaggcccggattgactcaggctccgaggtcatcgtcggggtgaataagtaccagctggaaaaagaagatgcagtggaagtcctcgccatagataatacctctgtacggaataggcagattgagaaacttaagaaaattaagagcagccgggaccaagcccttgccgaaaggtgtctcgccgctttgacagagtgcgccgcgagcggagatggcaatattctggctctggccgtggatgccagccgcgcgcgctgcactgttggggaaattacggatgccttaaaaaaagttttcggggaacacaaggctaacgacagaatggtctctggggcgtaccgccaggaatttggcgagagcaaagaaattaccagcgctattaagagggtgcataagttcatggagcgggagggtagacgccctagactccttgtcgccaaaatgggacaggacggacacgaccgcggagccaaggtgattgcaacgggctttgctgacctgggctttgacgtcgatatcggccctctgttccagactccacgcgaagtcgcccagcaggccgtcgacgctgatgttcatgccgtaggagtgtccacactcgcggcggggcacaagactttagtacccgagctgattaaggagctgaacagcctggggagaccagacatcctcgtcatgtgcggcggggttattccacctcaggactacgagtttttattcgaagtgggggtatctaacgttttcggacctggtactcgtattcccaaggccgctgttcaggtcctggacgacattgagaagtgcctggagaagaagcaacagtctgtt

SEQ ID NO: 84 - DNA, 2250 bp, Artificial Sequence
  Codon optimized sequence that encodes an MCM polypeptide with the I671V mutation
atgctcagagcgaaaaaccagcttttcctcctttctccgcactatctgcgacaggtcaaagaaagttctgggtctcgtctgattcagcaacgcctactgcaccagcagcagccactgcaccccgagtgggcagcgcttgccaagaagcagcttaagggaaaaaacccagaggatctgatctggcacacccccgagggaattagcataaagcctctgtattccaagcgggatacaatggacctccctgaggagcttcccggcgtgaagccattcacccgtgggccctatccgaccatgtacactttcagaccctggaccattcgacagtatgctgggttcagtaccgtagaagagagtaacaagttttataaggacaatatcaaggccggccagcagggcctatccgttgcctttgatctggcgacgcaccggggctatgacagcgacaacccaagggtccgcggggacgtgggaatggccggtgtcgccatcgatacagtcgaagacaccaaaattctgtttgatggcattcctctggaaaaaatgtctgtgagtatgactatgaacggggccgtgatccccgttcttgctaactttattgtaacgggggaggagcagggcgtaccaaaagaaaagctcacagggactattcagaacgacatccttaaagagtttatggtaagaaatacttatatctttcctcctgagccttcgatgaagataatcgccgacatttttgagtatactgcaaagcacatgcctaagtttaattccatcagtatcagcggttatcatatgcaggaggctggagctgacgccattctagaacttgcctacaccctggccgatgggttggagtacagtaggacaggtttgcaggctggcttaacaatcgatgaatttgcccctaggctgtccttcttctggggcataggcatgaacttttacatggagatagctaaaatgcgcgctggcagaaggctgtgggcccatctgattgagaagatgtttcaaccaaagaacagtaagagcctactcttgcgggcccactgccagacttcgggctggagcctgacagagcaggacccctacaacaacatcgtccgcactgccatcgaagctatggccgctgtattcggcggcacgcagtcccttcacaccaactcgttcgacgaggctctcgggctgcctactgtcaagtcagccaggatagcaaggaacacacagatcatcattcaagaggaaagcggcattccaaaggttgctgacccgtggggaggctcctacatgatggaatgcctgaccaacgacgtttatgatgctgcactcaagttgatcaacgaaatcgaagagatgggcggaatggctaaagctgtggccgagggcattccgaagcttagaatagaggaatgcgccgccagacggcaggcccgtatcgacagtggctctgaagtaattgtcggtgtcaataaataccagctggaaaaggaagacgcagttgaagtcctggcaatagacaatacaagcgttcggaacagacagattgagaaactaaaaaagataaagtcttctcgggatcaggccctagcggaacgttgcctggctgcccttaccgagtgcgcagcctctggcgacgggaacatcttagccttggcagtggacgcgtcacgcgcaagatgtaccgtgggcgaaattacagacgccttgaaaaaagtttttggtgaacacaaggcaaatgaccgtatggtgagcggggcctaccggcaagagttcggggagagcaaagagataacgagcgcaattaaaagggtgcataagtttatggagagggaaggtcgccggccgagactgctggtagccaaaatggggcaggacggccatgatcgaggcgctaaagtgattgctaccggcttcgctgatctggggtttgacgttgacattgggccattgttccagactcctagagaggtggcccaacaggctgttgatgcggacgtgcacgctgtaggcgtgtcaacattagctgctggacacaagactctcgtgcccgaactgatcaaggagcttaattcattgggaaggcccgatatccttgtcatgtgcggaggagtgattcccccccaagattacgaatttctcttcgaggtaggagtcagtaacgttttcggaccagggacgagaatccccaaggctgccgtgcaggtgttggatgatattgagaagtgcctcgaaaagaagcagcagagcgta

SEQ ID NO: 85 - DNA, 2250 bp, Artificial Sequence
  Codon optimized sequence that encodes an MCM polypeptide with the I671V mutation
atgctccgcgccaagaatcagctgttcttgctcagtccacattatctgaggcaggtcaaggaatcctccgggagcagactgatccagcagagactgcttcaccagcaacaacctctgcacccagagtgggcggcgctcgctaagaagcagctgaaaggtaagaaccccgaagatctgatctggcacaccccggaggggatctccattaagcctctttattccaaacgggacaccatggatttgcctgaagaactgcccggtgtcaagccattcactcgggggccctaccctaccatgtacacattccggccttggactatccgacagtacgcagggttttccaccgttgaggaaagcaataaattctataaggataacatcaaagccggtcagcaaggcctctccgtcgcttttgatctcgccacacatcgcgggtatgattcagataatccacgagtcaggggggatgtcgggatggcaggagtcgctatagatacagtcgaagataccaagatattgtttgacggtattcctcttgaaaagatgtcagtttctatgacgatgaatggtgccgtcataccagtactggcaaatttcattgtaactggggaggaacagggagtgcccaaggaaaagcttactggcacaattcagaatgacatccttaaagaatttatggtgcggaacacctatatctttccacctgaacccagtatgaaaattatcgctgatatctttgaatatactgccaaacacatgccaaagttcaactctatatctatcagcggttatcatatgcaggaagccggagccgatgcgattctggaactggcctacaccttggctgatggcctggaatactctcgcactggtctgcaagctggcttgacaattgacgagttcgccccacggttgtcctttttttggggcattggaatgaatttttacatggaaatcgcgaaaatgcgcgctggcaggcggctctgggcccaccttattgagaagatgttccagccaaaaaattcgaagtccctgctgttgcgagcccactgccaaacaagtggatggagtctcactgagcaagacccttacaataacatcgtccggacagctatcgaggcgatggctgccgtgttcggagggacccagtctcttcatacaaactcttttgacgaggccctgggactccccactgttaagagtgctcgcattgctcggaacactcaaatcatcatccaagaggaatccggtatccccaaagtcgccgatccctggggaggctcatatatgatggaatgtctgaccaacgacgtgtacgatgcggctctcaagctgattaatgagattgaagagatggggggaatggctaaggccgtggccgagggaattccgaagctgcgcatcgaggagtgtgcggccaggagacaggcccggatcgacagcggaagtgaagtgatagtgggcgtcaataagtatcagctagagaaagaagacgccgtggaggttctagctatcgacaacacgtccgtgcgtaacaggcagattgagaaactcaagaaaattaagagctcccgcgatcaggccttggctgagagatgcttagccgccctgactgaatgtgctgcctccggggacggtaatatcctcgccctcgctgttgatgcttcaagggcgcgttgcactgttggcgagattaccgacgctctaaaaaaggtgttcggggagcataaagctaacgaccggatggtgtccggtgcatacagacaagagttcggtgagagcaaggagattacttccgcaatcaagcgggtgcataagttcatggaaagggaaggtcggagaccaaggctccttgtcgccaaaatggggcaggatggacacgacaggggagccaaggtgattgctacaggtttcgccgacttgggtttcgatgtagatattggacccctttttcaaacacccagagaggtggctcagcaggccgtcgacgccgatgtgcacgcagtgggggtgtccaccctcgccgcagggcacaagaccctcgtacccgaattgattaaggagcttaactccctgggcagacctgacattttggttatgtgtggtggtgtgataccgccacaggattacgaattcctgtttgaggtgggagtgagcaacgtattcggccccggcaccaggatcccgaaggctgccgtacaagtgttggatgacatcgagaagtgcctcgagaagaaacagcagtctgtc

SEQ ID NO: 86 - DNA, 2250 bp, Artificial Sequence
  Codon optimized sequence that encodes an MCM polypeptide with the I671V mutation
atgcttagggcaaaaaaccagttattcttgctgagcccgcactatttgcgtcaagtcaaggagtctagcgggtccagactgattcagcagcgactgctgcatcagcagcaacctctccaccccgagtgggccgctttagccaaaaaacagttaaaaggcaaaaatcccgaagacctgatctggcacactccagagggcattagcatcaaacccctgtattctaaacgcgataccatggaccttccagaggaactgccaggcgtgaagccgttcacacgtggaccttatcccactatgtacaccttccgcccatggactattcggcagtacgccggtttttctacggttgaagaaagcaataagttctataaagataatatcaaagccggacagcagggactgtctgttgcattcgacctggccactcacagagggtatgactcagataatcccagagtcagaggtgacgttggcatggccggggtggctattgatacagtcgaagacacaaaaatactgtttgacggaatccccctcgaaaaaatgagcgtctcaatgacgatgaacggtgccgtgatacccgtccttgcgaatttcattgtcacaggagaagagcagggggtcccaaaagaaaaactaacaggtacaattcagaatgacatcctgaaggaattcatggttcgcaacacttacatctttccccctgaaccctcgatgaagatcatcgccgacattttcgaatataccgcaaaacacatgcctaagttcaactccatctccatcagcgggtaccacatgcaggaagccggggctgacgcgatcctggagctggcatacactctcgccgatggcttagagtattccagaaccggcttgcaggcaggcctgacaatagacgagtttgcgccacggctgtctttcttctggggaatcggcatgaacttttacatggagatagcaaagatgagagcagggcggcgcttgtgggctcatctgatcgagaaaatgttccagccgaagaacagcaagtccctgctgctgcgggcccactgtcaaacctctggttggagcctgacagagcaggatccttacaataatatagtgcgaacagcgattgaggcaatggctgctgtgttcggcggaacacagagtctgcatacaaactcttttgacgaggcccttggcctgccaacagtgaaaagcgctagaatcgcccggaatactcagatcataatccaggaagagagtggaatccccaaagtggcagatccttggggtgggagttatatgatggaatgtctgaccaatgatgtctacgatgccgctctcaagctgattaatgaaatcgaggagatgggtgggatggccaaggctgtcgccgagggtatccccaaactcaggattgaggagtgcgctgcccggagacaggcgcgaatcgattcgggctctgaggtgatcgtgggcgtgaacaagtaccagctagagaaggaggacgctgtggaagtcctggccattgataataccagtgtgcggaacaggcagatcgaaaaattaaaaaaaattaaaagtagtcgcgaccaagcactggcagagcgctgcttggcggccctgacggagtgcgcagcctctggagatggcaatatcctggcactggccgtcgacgcctcaagagctcgatgcaccgtaggcgagatcaccgacgccctgaagaaggtcttcggagaacataaagccaatgaccggatggtgagcggcgcctataggcaggagtttggggagagtaaagagatcacatctgcaataaagcgtgtgcataagtttatggaaagggagggaaggcgcccacgactccttgttgctaagatgggtcaagacggccatgaccgcggcgccaaagtcatcgcaaccgggttcgctgacttggggtttgacgtcgatatcggacccctgtttcagacgccacgggaagtagctcagcaagccgtggacgcggatgtgcacgccgtaggcgtgtctaccttggcagcaggccataaaaccctagtgcccgagctcataaaagagctgaacagcctgggacggcctgacatcctagtgatgtgcgggggcgtcatcccacctcaggattatgagttcctcttcgaggtgggagtttccaatgtgtttggacccggcacacgaatccccaaagcagccgtgcaggtgttggatgacatcgagaaatgcttagaaaagaaacaacagtccgtc

SEQ ID NO: 87 - DNA, 2250 bp, Artificial Sequence
  Codon optimized sequence that encodes an MCM polypeptide with the I671V mutation
atgctgcgcgcaaaaaaccaactgttcctcctgagcccacactatttgcgacaggtcaaagagtcctctggatcaaggttaatccagcaacggctcctgcatcagcagcagccactccaccccgagtgggccgcccttgcaaagaagcagttaaaaggcaaaaatcccgaagatctgatctggcacacaccagagggaatcagcatcaagccgctttacagtaaaagggacactatggatcttcctgaggaactcccaggcgtgaaacccttcacgaggggcccttatcccactatgtatacctttagaccctggaccattaggcaatacgccggattctcgaccgtggaagagtctaataagttttacaaggacaatattaaggcagggcagcaggggttgagtgtcgcctttgatctcgcaacacatagggggtacgacagtgacaatccaagggtccgaggtgacgtggggatggcgggcgtggccatcgacactgtggaggatactaagattctgttcgatggaatccccctggagaaaatgtcagtctccatgacaatgaatggtgctgtaattcctgttctggctaactttattgtgaccggggaagagcagggagttcccaaggaaaagctaactggcactattcaaaatgatatccttaaagaattcatggtccgaaatacctatatatttccacctgagccatctatgaaaataattgcagatatctttgagtatactgctaagcatatgccaaagttcaacagtattagcattagtgggtaccacatgcaggaagctggggctgatgcaattctggaacttgcgtataccttggccgatggactcgaatacagccggaccggcctgcaggccggactgacaatagatgagttcgctccacgcctttctttcttttggggcattggaatgaacttctacatggaaattgcaaagatgcgggctgggagaaggctatgggctcacctcatcgaaaagatgtttcaacccaaaaatagcaagtctctcctcctgcgggctcactgccagaccagcgggtggtctctcaccgagcaagacccttacaataacatcgtgagaactgccattgaggcgatggctgctgtgtttggtggtacccaatcacttcacacgaactcttttgacgaggcccttgggctgccaaccgtgaagagcgctcggattgctcgcaacactcagattataattcaggaggagtcaggcatccccaaggtggcggacccttggggaggaagctacatgatggagtgcctgaccaacgacgtgtacgatgcagctctgaagctgatcaacgaaatcgaagaaatggggggtatggccaaggccgtggccgaagggattcctaaactgagaattgaagaatgtgctgctcgccggcaggccagaattgatagcgggtcagaggtgatcgtgggggtgaacaagtatcaattggagaaggaagacgccgtcgaggtgttagcaatagataatacttctgtcagaaatcgtcagatcgaaaagctcaaaaagatcaaatcctctcgggatcaggctcttgctgagaggtgcctcgctgccctgactgaatgcgccgcttcgggcgacggtaatatcctggcattagctgtggacgcctcacgggcgcgttgcaccgtaggtgagattacagacgcccttaagaaggttttcggggagcacaaggcaaacgaccgaatggtgagcggggcttacaggcaggagttcggagagtcaaaagagattacatctgccatcaagcgcgtccataaattcatggagcgcgagggacgcagacccagactgctcgtcgctaaaatgggacaggatggccacgaccggggcgccaaagtcatcgccaccggcttcgccgacctgggcttcgacgtggatataggtccgctattccaaactcccagagaagttgcccagcaggcagtggatgccgacgtgcacgctgtcggggtctccaccctcgctgcaggccataaaaccttggttccggagttaattaaagaacttaacagcctaggacgccctgatatcttggtgatgtgtgggggtgtgatcccaccccaggactatgaattcctgttcgaggtcggagtgtccaatgtgttcgggcccgggacccgaatacctaaggccgcagtgcaagtgttggatgatattgaaaagtgtctagaaaaaaaacagcagtctgtt

SEQ ID NO: 88 - DNA, 2250 bp, Artificial Sequence
  Codon optimized sequence that encodes an MCM polypeptide with the I671V mutation
atgctgcgcgcaaagaaccagctgtttttactgtcacctcattacctgcgccaggtcaaagaatctagtggatccagactgatacaacagcgtctgctgcaccagcaacagcctttacaccctgagtgggctgccctcgctaaaaagcagctgaagggaaagaatccagaggatcttatttggcacacacctgagggcatatcaatcaagcctctttatagcaagagggatacgatggacttgcctgaagaactccccggcgttaagcccttcaccagggggccatatccaactatgtatacgttcagaccctggactattcggcagtacgccggattctccaccgtggaagaatcaaataagttctacaaagataacatcaaagcaggccagcagggcctgagtgtcgctttcgatctcgctacacatcgcggctacgattcagacaaccccagagtgaggggagatgtgggcatggcaggggttgctattgatacagtggaggatactaagatcctgttcgacggcatccctcttgaaaagatgtcagtgagcatgacaatgaacggcgccgtgataccagtcctggcaaattttatcgtgacaggggaagagcagggtgtgcctaaggagaaactgaccggtactatccagaacgacatccttaaagaatttatggtgcggaatacctatatttttcccccagaaccaagtatgaaaattatagcagacatcttcgagtacacggcgaaacatatgcccaagttcaattcaatcagcatctctggttaccacatgcaagaagctggggccgacgctatcctggaactcgcttacactctggcagacggactagagtattcacgcacaggcctgcaagcaggattgaccatagatgagttcgcccccaggctgtctttcttctggggtatcgggatgaacttttatatggagatcgcaaagatgcgcgccggacgtagactatgggcgcacctcattgagaaaatgttccagccaaagaactccaagagcctgcttcttagggctcactgccagactagtggctggagcctgaccgaacaggacccttataacaacatcgtccgcactgccatcgaagctatggctgcagtctttgggggtacacagtccctccacaccaattctttcgacgaagccctgggcttgccgaccgtcaagagcgctcgtatcgcgagaaatacccagattattatccaagaggaatccggcatccccaaggtggctgacccttggggcggaagctacatgatggagtgtcttactaatgacgtatacgatgctgccctgaagctcattaatgaaatagaagaaatgggaggtatggcaaaagctgtggcagagggcataccgaagctgagaatcgaggagtgtgccgcacggcgtcaggccaggattgatagcggttccgaagtgatcgtcggagtgaacaaataccaactcgaaaaagaggacgcagtcgaggttttggccatcgacaacacttccgttcgtaaccggcagattgagaagcttaagaagatcaaatctagccgcgaccaggctctcgccgaacgttgcctggcggccctcaccgagtgcgcagcatccggagatggtaatatcttagcactggctgtggacgcctcccgcgcccggtgtactgtaggggagatcacggatgccttaaagaaagtctttggcgaacataaggcaaacgacaggatggtaagcggagcttaccggcaggaattcggggaatcaaaagaaatcaccagtgctatcaaacgggtgcataagttcatggagcgggaaggacgccgcccacgactactcgtggccaagatggggcaggacggacatgaccgaggagccaaagtaattgctaccggtttcgctgacctggggttcgatgtggatatcgggccactctttcagactcctcgcgaggtcgctcagcaagctgttgacgcggatgtccacgctgtcggtgtctccactctagcagccggccacaaaacgttggtgcccgaactaattaaagaactgaattcactgggaagacccgacatattggtcatgtgcggaggggtgattccaccccaggactatgagttcctgtttgaagtgggcgtttcaaacgtattcggaccagggacccggattcccaaggctgccgtgcaggtgctcgacgatatagagaaatgcctggagaagaagcagcagagtgtg

SEQ ID NO: 89 - DNA, 2250 bp, Artificial Sequence
  Codon optimized sequence that encodes an MCM polypeptide with the I671V mutation
atgctgcgggctaagaaccagttgtttctgctgtcaccacattatctgcgccaggttaaggaatctagcggctcaagactgattcagcagcgccttctgcaccagcaacaacccctgcatccagagtgggccgcgctcgcaaaaaaacagttaaaggggaagaacccagaggatctcatctggcatacgcccgagggtatttcgattaagcccttgtattctaagagagataccatggacttgccagaagagcttcctggagttaaaccatttacacgagggccctaccccactatgtatacgttcaggccctggactattagacagtacgcaggtttcagtactgtggaagagtcaaataagttctataaagataatatcaaagccggtcaacaggggttgtcagtggctttcgatctggctacccatcggggttacgacagtgataaccctagggtaagaggggatgtcggaatggccggcgtggccatagacactgtggaggatacaaaaatcctgttcgacgggattcctctcgagaaaatgagtgttagtatgacgatgaatggcgccgtcataccagtcctcgccaattttatagtgactggggaagaacagggggtgccaaaagagaagttgaccggaaccatccagaacgatatattaaaagagttcatggttcgaaatacttacatttttcctccggagccttcaatgaaaattatcgccgatatctttgagtacacagcaaaacacatgccaaaattcaacagcatctcaataagcgggtatcatatgcaagaggccggtgctgatgcaattctcgagctcgcctacactctggctgatggcctcgagtattcccgcaccgggctccaagccggcctgacgattgatgaattcgctccaaggctgtcttttttctggggcatcggaatgaatttctacatggagattgctaagatgagagcagggaggcgcctttgggcacacctaatagagaagatgttccagcccaaaaactccaaatctttgctgctgcgcgcacattgtcagactagtggttggtccctgactgagcaagatccctacaacaacatagtgcgaaccgccattgaagccatggcggccgtctttgggggcacgcagagcctgcacaccaattcctttgatgaagctttgggcctgccaacagtcaagtctgcacggattgcacggaacacccagatcatcatacaggaggagagcgggataccaaaagttgccgatccctggggaggatcctacatgatggagtgtttaacaaacgacgtgtacgacgcagccctgaaattgataaacgagattgaggagatgggaggcatggccaaagccgtcgctgagggcattccaaaacttcgcatcgaagaatgtgctgcccgtcggcaggcccgaatcgactctggttctgaggtgatcgttggagtgaacaaatatcagctcgagaaggaagatgccgtggaggtactggccatagacaacacatccgtccgaaaccgacagatcgagaagttaaagaagattaagagttcccgagaccaggcgctggccgaacggtgtctagctgccttgacagagtgtgctgcgtccggggacggtaatatactggccttagcagttgacgcttcgagagccaggtgtacagtgggggagatcactgatgccttaaaaaaggtcttcggtgagcataaggctaacgatcggatggtatcgggggcctacagacaagagttcggcgagtcgaaggagattactagcgcaattaagagggtccacaaattcatggagcgagagggtaggaggcctcggctcttagtcgcaaaaatggggcaagatggccacgatcgaggagccaaggtgattgctaccggatttgctgatctaggcttcgatgttgacattgggccgttgttccaaacgccccgggaggtggcacagcaagccgttgacgcagacgtgcatgccgtcggtgtgagtacccttgctgcaggacataaaactcttgttcctgagcttataaaagagttgaattctctgggtcgccctgacatcctggtcatgtgcggaggtgtcattccgccccaagattacgaattcttgtttgaggtcggggtaagtaatgtgttcggcccaggtacgcggattcctaaagctgctgttcaggttctggatgatatcgagaaatgcctcgagaaaaaacagcagagtgtc

SEQ ID NO: 90 - DNA, 2250 bp, Artificial Sequence
  Codon optimized sequence that encodes an MCM polypeptide with the I671V mutation
atgctgcgggcaaaaaatcaattatttcttctgtccccccactaccttagacaagtcaaagaatcctcaggtagccgtcttattcagcagagattgttacaccaacagcagcccctgcaccctgagtgggcagcacttgccaagaagcagctcaaggggaaaaatccagaggatctgatttggcatacacctgaaggaatctccatcaagcccctatattctaaacgggacactatggacctgcctgaggaactcccaggggtgaaaccgtttaccaggggaccctacccaaccatgtataccttccggccctggacaatccgtcagtacgccggtttttctaccgtcgaggaatccaataagttttataaagataacatcaaggctggccagcaaggccttagcgtggcctttgatctggctacccatcgggggtacgactccgataacccccgtgtgagaggagacgtaggcatggcaggggtggctatcgacaccgtcgaggacacgaagatactgtttgacggaattcccctggaaaagatgtcagtgtccatgaccatgaatggcgcggtgatcccagttctggccaacttcatcgttacaggagaagaacagggcgtgcccaaggagaagctgaccgggactattcaaaatgatattctcaaagaatttatggtgcgcaatacctatatctttccccccgaaccaagtatgaaaattatagccgatatcttcgaatataccgctaagcacatgcctaagttcaacagcattagcatcagtggttatcatatgcaggaagcaggcgcagacgccatcttagaactggcatacacactggccgacggactggagtattcccggactggcctccaggctgggctgactatcgatgagttcgccccccgactctcttttttctggggaattggaatgaatttctatatggagatcgccaagatgcgggctggccgaaggctgtgggcccatctgatcgaaaaaatgttccagcccaagaactcaaagtcgctgctccttcgggcccactgccaaacctccggttggtccctgaccgagcaggatccctacaacaatatcgtgcgaactgccattgaggctatggccgctgtgtttggtggcacccagtccctacatacaaacagctttgacgaagctctgggactcccaaccgtgaaatctgccaggatcgcgagaaacactcagattattatccaggaggaaagtggcatccccaaggtggccgacccatggggcggctcatatatgatggaatgcctgactaatgacgtgtatgacgctgccctgaaactgatcaacgagatcgaggagatgggaggcatggccaaagctgttgctgagggcataccaaagctgcgtatcgaagagtgcgctgcacggagacaggcgagaattgactccgggtccgaggtaattgtgggagttaataagtaccagctggagaaggaagatgccgtcgaggttctggcaattgacaatacatccgtgagaaaccgacagattgagaagctgaaaaaaattaagtcttccagagaccaggccctggcggagcgctgtctggctgcactcactgagtgcgccgcgtcgggggatggcaacatcctggctctcgccgtggacgcatcgcgcgcccgctgcaccgtcggcgaaatcacagatgccttgaagaaggtgttcggcgagcacaaagccaatgacagaatggtgtctggggcctacaggcaagagtttggagaatccaaggaaataacttcggcaataaagagggttcataaattcatggagcgggagggtaggcgtcccagattactggtggccaagatgggacaggacgggcacgataggggagcaaaggtgatcgctactgggttcgccgacttaggatttgacgtggacataggccccttattccagacgccaagagaagtcgcacagcaggcggtagacgcagacgtgcacgcagtcggggtgtccacactggccgcggggcacaagaccctggttccggagctcattaaggaactgaattctttgggcagacctgacattcttgtgatgtgtggaggagtcatacctcctcaggactacgaattccttttcgaggtgggggtgtctaatgtattcgggcctggcacccgaattcccaaggccgcggtgcaggtactcgacgacatcgaaaaatgtctggagaaaaaacagcagtccgtg

SEQ ID NO: 91 - DNA, 2250 bp, Artificial Sequence
  Codon optimized sequence that encodes an MCM polypeptide with the I671V mutation
atgcttcgtgcaaaaaaccaactctttctgttatccccccactacctcaggcaggtgaaagagtcaagtgggtcccggctaattcagcagcgtctgctgcatcagcaacagcctcttcaccctgagtgggcagctctcgccaagaagcagctcaagggcaagaatccagaggatctgatctggcacactcccgagggcattagcatcaaacccttgtattcaaagcgcgacaccatggacttacccgaggagctgcctggcgtgaaacccttcacgcggggaccatatccaactatgtatactttcaggccttggacaattcgtcagtacgctggtttttccacagtagaggagagcaacaagttctacaaagataacataaaggccggacagcaggggctgtcggtcgctttcgatctggctacccaccggggctatgattcggacaacccaagggttagaggtgatgtgggaatggccggtgtcgcgatcgataccgttgaagacaccaaaattctattcgacggaattcccctggagaaaatgtctgtttctatgactatgaatggcgcagtcattcccgtccttgccaattttatcgtcaccggagaagagcaaggggtcccaaaagaaaaactgactggcaccattcagaacgatattctgaaggagtttatggttaggaatacctacatctttcctccagaaccaagcatgaagataatcgccgacatctttgagtacacagctaaacacatgccgaaattcaacagcatcagcatcagcggatatcacatgcaagaggcaggggctgatgctatcctcgaactggcgtacactctcgctgatgggctggagtacagcagaacagggctgcaggcagggctgactatcgacgaattcgctccccgcctgagcttcttctggggcattgggatgaacttttatatggagattgctaaaatgcgggcgggaagacggctatgggctcatctgatcgagaaaatgtttcagcctaagaactccaagtcgctcctgctgagggcccattgccagaccagcggttggagcctgaccgagcaggacccgtacaacaacatcgtgagaacagccatcgaggccatggctgcggtctttgggggtacccagagtctccatacgaattcttttgacgaggccctcggacttccgacagtcaagagcgcccggatcgctagaaatactcaaatcatcatacaggaggaatctggcattcccaaagtcgcagacccgtgggggggcagttacatgatggagtgtctgacgaacgacgtgtatgatgccgcgttaaagctgatcaatgagatcgaggagatgggggggatggccaaggcagtagcggaaggcattcccaaactccgaattgaggagtgcgccgcgcgacgccaggcccgaatcgactctggaagcgaggtgatcgtgggagtgaacaagtatcagctggagaaggaggacgctgtggaagttctcgcaattgacaacacttcggtgaggaatcgacagatcgagaaactgaagaagatcaaatcaagtcgcgaccaagcgctggccgaaaggtgtctggcggccttgactgaatgcgccgccagcggcgacggcaatattcttgcgctggcggttgatgcttcccgggctagatgcaccgtaggcgagattactgacgctcttaagaaggtatttggtgaacataaagcgaatgatcgcatggtgtctggcgcataccgccaggaattcggagagtccaaagagataacttcagctattaaaagggtccacaagttcatggaacgcgagggccgtcgcccccgcctgctggttgcgaagatgggccaggacgggcacgacagaggcgctaaagtcattgcaaccggtttcgccgatctgggctttgacgtggacatcgggcctctgttccaaacgcccagggaggtggctcagcaggccgtggatgctgatgtgcatgccgttggtgtgagtacattggcagctggccacaaaacgctcgtgcctgaactgattaaggagctgaattcgctggggcggcctgatattttggtgatgtgcggtggagtaatccctcctcaggactatgagttcctgtttgaggtcggggtttcaaacgtgtttgggccgggaaccaggatccccaaagctgcagtccaagtcctggacgatatcgagaaatgcctggaaaagaaacagcaatccgtg

SEQ ID NO: 92 - DNA, 2250 bp, Artificial Sequence
  Codon optimized sequence that encodes an MCM polypeptide with the I671V mutation
atgctccgggcaaaaaaccagctctttctgctgagccctcattacctgaggcaagtgaaggagtcaagtgggagtcggctgatacagcagaggttactgcaccaacaacaaccactgcatcctgaatgggcagcactggcaaagaagcagctcaagggaaaaaaccccgaagacttaatttggcacacacctgaaggaatcagcattaagccgttgtattcgaagagggatacaatggatctcccggaggaactgcccggagttaagccattcacccggggaccataccctacaatgtatactttccgcccttggaccatccgtcaatatgccggcttttccactgtggaagagagcaataaattctacaaggataatatcaaggccggacagcaaggcctatctgtggcgttcgacctggcaacccaccgtgggtacgatagtgacaacccaagggtccgtggggacgtggggatggctggggtggctattgatacagtggaagacacaaaaatcctctttgacggaatacctctggaaaagatgagtgtctccatgacaatgaacggcgccgtgatccccgtgctggccaacttcatcgtgaccggagaggagcaaggggtgcctaaggaaaagctcacagggaccatccagaatgatatcctcaaagaattcatggtgaggaatacatacatctttccgcccgagccaagcatgaagattatcgctgacatcttcgagtatacggctaagcacatgcctaaatttaacagtattagtatttctggctatcacatgcaggaagcaggggctgatgctatcctggagctggcgtacacactcgccgatgggttggaatacagtaggaccggactacaggctgggttaaccattgatgagttcgcacctcgccttagcttcttctggggtataggcatgaatttttacatggagatcgcaaagatgagggcgggccgaaggctctgggcgcatctcattgagaaaatgtttcagccaaaaaactctaagagtctactgctgcgggcccactgtcagacaagcggctggtcgttgaccgagcaggacccctacaacaacatcgttcggacagcgatcgaagccatggcagcagtcttcggagggacccagtccttgcacaccaattcatttgatgaggctctcggtctgccaactgttaaaagcgctagaatcgcccggaatacacagattattatccaagaagagagcggaatcccaaaggttgcggacccatgggggggcagttacatgatggagtgtcttactaacgatgtgtacgacgcagccttaaaactgataaatgagatcgaagagatgggaggcatggccaaggccgtggccgagggaataccgaagctaagaatagaggagtgtgctgcaagaaggcaggcccgaattgattctggcagcgaggttattgttggagttaataaatatcagctggaaaaggaagacgctgtcgaagtgctggcaatagacaacacctccgtgcgcaaccggcagatcgagaaactgaagaagatcaagtcatcccgggaccaagccctggcggaacgttgtcttgcggcgctcacagaatgtgctgcgagtggggatggaaacattctggccctagccgtcgatgcaagccgcgctcgatgtaccgtgggtgagattactgatgccttgaaaaaagtattcggcgaacataaggctaatgacagaatggtgtcaggagcctaccgccaggaatttggcgagagcaaagaaatcacaagcgccatcaagagggtccataaatttatggaacgcgaggggcggagaccacgcctgctggtggccaaaatggggcaagatggtcacgatcggggagccaaagttatcgctactggattcgcagatttaggctttgacgtggatatcggaccactctttcagaccccccgcgaggtcgcgcagcaggcagtcgatgctgatgtccatgccgtaggggtgtccaccttagctgctggccacaaaactctcgtgccagaactgatcaaagaactgaatagcttgggtagaccagatattttggtgatgtgtggaggcgtgatcccaccacaggattatgagttcctttttgaggtgggggtgtctaacgtttttggtccaggaaccagaatcccaaaggctgctgtgcaggtgctggatgatattgagaagtgcctcgaaaagaagcagcagtctgtc

SEQ ID NO: 93 - DNA, 2250 bp, Artificial Sequence
  Codon optimized sequence that encodes an MCM polypeptide with the I671V mutation
atgctgcgtgccaaaaatcagctttttttgctctccccacattacctgcgacaggtcaaagagtcctccggtagccgactgattcaacagagattgcttcatcagcagcagccgttacatcccgagtgggcagctctggcaaagaaacagctgaagggcaagaatcctgaggatctcatttggcacacgccagagggaatctcaattaagcccctgtatagcaagcgcgacaccatggatcttcctgaggagctgcctggagtgaagccttttactaggggaccctaccctaccatgtatacttttcggccttggacaattcgacagtacgcaggattctccacagtcgaggaaagtaataaattttacaaagataacatcaaagccgggcagcaggggctgtctgtggctttcgatctggccacccatcggggatacgattcagacaatcctcgggtccgaggggatgtcggcatggcgggggtggcgatagacacagtggaggatacgaaaattctgttcgacggcattcctctggagaagatgtctgtcagcatgaccatgaacggggcagtaatccccgttttggcgaatttcatagttactggggaagaacagggagtacccaaagagaagctcacaggtaccatccaaaacgatatattgaaggaattcatggtcaggaatacgtacatcttccctccagaaccatcgatgaaaataatcgctgacatttttgaatatactgccaaacatatgcccaagtttaacagtattagcataagtggataccacatgcaggaagccggcgccgacgccattctcgagcttgcttacaccttggctgacgggctggaatactctcgtactgggttgcaggctggcctcactattgatgaatttgcacctcggctttccttcttctgggggataggcatgaacttttacatggaaatcgccaaaatgagagccgggagaaggctgtgggcccatctgattgagaagatgtttcagcctaagaattcgaagagtttactcttgcgggcccattgccaaacgagtgggtggtctcttacggaacaggatccttataacaatatcgtccggacagccatcgaggctatggccgccgtttttggtggcacccagtcccttcataccaattctttcgacgaagctcttggattaccgaccgtgaaatccgcccggattgcccgcaatacccagatcatcattcaggaagaaagtgggatccccaaagtcgcagatccttggggaggaagctacatgatggagtgcctgacgaacgatgtctacgacgccgcacttaagttgatcaatgaaattgaggaaatgggaggcatggccaaagcggtggctgaggggatacccaagttacggatagaagagtgtgctgccagaaggcaggctcggatcgatagcggctcagaggtcattgtgggagtgaacaagtaccaattggaaaaagaggatgctgtggaagtgctggcaattgataatacctcagtccggaatagacagattgagaagcttaaaaaaatcaagtctagccgagaccaggcgttagccgagaggtgcctcgcggctctcaccgagtgtgccgcctcgggtgacggcaacatcctggcccttgccgtcgatgcctcccgggctcgctgtaccgtgggtgagattactgacgcactcaaaaaagtatttggggaacataaagctaatgatcgcatggtctccggtgcgtaccgtcaggaattcggcgaatcaaaggagattacatccgcgataaaaagggtccataaatttatggaacgagaggggcgccggccgcgcctgctggtggcaaaaatgggacaggatgggcatgatagaggcgccaaggtgatcgccacaggcttcgctgatcttggtttcgatgtagacattggacccctcttccagacccccagagaagttgcccaacaagccgtagatgccgacgttcatgcggtaggcgttagcaccctcgccgccggccacaagacgctggtgccagagctgattaaagaattaaactcactgggaaggcctgatatactggtgatgtgtggcggggtgatcccgccccaggattacgaattcctatttgaggtgggggtttccaatgtttttggcccagggactcgaattcccaaggctgctgtacaggtgctagacgatatagagaagtgcctggagaagaagcagcagtctgtg

SEQ ID NO: 94 - DNA, 2250 bp, Artificial Sequence
  Codon optimized sequence that encodes an MCM polypeptide with the I671V mutation
atgttgagagccaagaatcaactctttctcttatcaccccactacctgagacaagtgaaagagtcgtctggcagtcgactgattcaacaaagattactccaccaacagcagcctctgcacccagagtgggccgccctggctaagaaacagctgaaggggaaaaaccctgaggacctgatatggcacacacctgaaggcatctccattaaaccattgtatagtaaaagagataccatggatctgcctgaggagcttcctggggtgaaaccgtttactaggggtccataccccaccatgtatacttttcgcccttggacaatcaggcagtacgcgggattttcaacagtggaggagagtaataagttttataaggataatatcaaagcgggacagcagggtctcagcgtagctttcgacctggccacacatcgtggatacgattccgataacccaagggtgcggggggatgtggggatggctggtgtggccatcgacaccgttgaagatactaagatcttgtttgatggaattccccttgaaaagatgtcagtcagcatgacaatgaatggggccgtcatcccagtgctggccaatttcatagtgacaggggaagagcagggagtcccaaaggagaaactcacagggaccatccagaacgacatcctcaaggaatttatggtccggaatacatacattttccctccggaaccctcaatgaagatcatcgctgacatcttcgagtacaccgctaaacatatgcctaaattcaattctatctcaatcagcggatatcacatgcaggaggcaggagccgacgctattctagaactcgcgtacactctggcagatggtctcgaatactcccggaccgggctccaagctgggttgaccattgacgaatttgcgcctcggctgagctttttttgggggattggcatgaatttctacatggagattgcaaaaatgcgtgccgggcgaagattatgggctcatctgatagaaaaaatgtttcagccaaagaatagcaagagtcttctgctgagagcacattgtcagacatcaggatggtccctgacagagcaggatccttataataatatcgtgcggacagcaattgaggcaatggctgctgtatttggtgggacccaaagtttacacacaaatagcttcgatgaggctctcgggcttcccaccgtcaagtctgctcggatcgctagaaacacgcagattatcatccaagaagaaagcggaatccccaaagtggcagacccttggggtgggtcatacatgatggaatgtctgactaacgatgtctacgatgctgcactgaagctgattaatgagatagaggagatggggggaatggccaaagccgtggctgagggcatccctaagttgcggatcgaagaatgtgccgcacgtagacaagccaggatagatagtggtagcgaggttatcgtcggagtgaataagtaccagctagagaaagaggacgccgtggaggtgttggcaattgataacacctccgttagaaacaggcagatcgagaaactaaaaaagattaaatcatcgagagaccaagctttggccgaaaggtgtctggctgcgctcacagaatgcgccgcttcaggcgatggcaacatcctggcactggctgttgatgcgtccagggctcgctgtaccgttggcgaaatcacagatgctctcaagaaggtctttggtgagcacaaagcaaacgaccggatggtctccggagcttaccggcaggaatttggagaaagcaaggagattacctcagctatcaaaagggtgcataagttcatggagcgtgaagggcgccggcccaggcttctggtggctaaaatgggccaggacggccatgaccgaggagccaaggtcatcgccacagggttcgccgatctaggctttgatgtggatatcgggcccttattccagactcctcgcgaggtagcacagcaggccgtcgatgccgatgtgcacgcagtgggcgtatctacactcgcggctgggcataagacgctagtacctgagctgatcaaggagctgaactccctgggcaggcccgatattctggtgatgtgtggcggggtgataccccctcaggattatgaattcttatttgaagtgggcgtcagtaatgtttttgggcctggtactcggatcccaaaggcggcagtgcaagtcttagatgacattgaaaaatgtctcgagaaaaagcagcagagcgtc

SEQ ID NO: 95 - DNA, 2250 bp, Artificial Sequence
  Codon optimized sequence that encodes an MCM polypeptide with the I671V mutation
atgctgcgagcaaagaatcagctgttcctcctgtccccacactatctacgccaagtgaaggagtcgagcggatctaggctaatccaacaaagactgctgcatcagcagcaaccactgcacccggaatgggctgcgctcgctaagaaacagctgaaaggtaaaaacccagaggatcttatctggcacactcccgaaggtatcagcattaaacctctttacagtaagcgcgatactatggacctccccgaagaactaccaggcgtgaaaccgtttactcgaggcccataccccaccatgtacacatttaggccttggacaatacgacagtacgccggattctcaaccgtggaagaaagcaacaaattctacaaagataatatcaaggcgggccagcagggattgagtgtagccttcgacctggcgacccacagagggtatgactccgacaacccccgggtgcggggcgacgtcggaatggcaggggtcgcgattgataccgttgaagatacgaagatcttatttgacgggattccactagaaaagatgtcagttagtatgacaatgaatggagccgtgattcccgtgctggccaactttatcgtgaccggagaagagcagggagtgccaaaggaaaagctgacaggaacaatccagaacgatatattaaaggaatttatggtgagaaacacatatatatttccacctgaaccctctatgaaaataatagcggatatattcgaatataccgccaaacatatgcccaagttcaactccatttccatcagtgggtaccacatgcaggaggccggtgccgatgcaattctcgagctcgcatatactctggctgatgggttggagtattcacggactggattgcaggcaggactaactattgatgagttcgcacccagactatcctttttttggggaatagggatgaatttctacatggaaattgcgaaaatgcgggccgggcggcggctatgggcgcacctgatcgagaagatgtttcaacccaagaacagtaagtccctgctcctcagagcacactgccagacatcaggctggtctcttaccgagcaggacccttataataacatagttcgtacagccattgaagctatggctgcagtatttggcgggacccagagtctgcatactaattcattcgatgaagcactggggttacctaccgtgaaaagcgctcgaatcgcaaggaacactcagatcattatccaggaagagagtggcatccctaaagtggccgatccctggggcggctcatatatgatggagtgcctgactaatgatgtgtacgacgctgctttgaaactgataaatgagatcgaggagatgggcggcatggccaaagccgtggccgaagggatccctaagttacggatcgaggagtgtgccgctcggcgacaggctcggatcgactctggctccgaggtcattgtcggcgtaaacaagtatcagctggaaaaggaggatgccgtggaggtgctcgcaatcgataacactagtgtgaggaatagacagattgaaaaactgaaaaaaattaagagcagccgagaccaagcccttgctgaaagatgcctcgccgcactcaccgaatgcgcagcctcaggcgatggcaatattcttgccttggcagtggacgcatcaagggcacgctgcaccgttggagaaatcaccgacgcacttaaaaaagtgttcggtgaacataaggccaatgaccggatggtcagcggcgcctataggcaggagtttggagagagtaaagaaattacttccgccatcaagcgcgtccacaaattcatggagcgggagggccggcgccccaggctgctggtggcaaaaatgggacaggatgggcacgatcggggagccaaagtgatagcaactgggtttgcagatctcggcttcgacgtggatatcgggcccttgttccagacgcctagggaggtggctcagcaggctgttgacgcagatgtccacgctgtgggcgtctcaactctggctgccggccataaaacccttgtgcctgagctgatcaaggagctgaatagtctgggtaggccggatatcctggtcatgtgtgggggggtcatccctccccaggattatgaatttctcttcgaggtcggcgtatctaacgtcttcggcccaggaacgaggatccccaaggcggccgtgcaggtacttgacgatattgagaaatgtcttgaaaagaaacagcagagtgtg

SEQ ID NO: 96 - DNA, 2250 bp, Artificial Sequence
  Codon optimized sequence that encodes an MCM polypeptide with the I671V mutation
atgctgcgtgccaaaaaccaactgtttctcctatcgcctcactatctccgccaggttaaggaatcttcgggctcccggctaatacagcagagactgctacatcagcagcaacctctacatccagagtgggcagcgctggcgaagaagcagctgaagggaaagaacccagaggatcttatctggcatacccccgaggggatatctattaaaccactgtacagcaaacgagacaccatggatctgccagaagagcttccgggggtgaaaccattcacacggggaccatatccaacaatgtacacgttccggccatggaccatccgacagtacgccggcttttcaactgtggaggaatccaacaagttttacaaggataatattaaggcaggacagcaggggctgtctgtcgctttcgacctcgccacccaccgcggttacgatagcgacaacccccgcgtcaggggggatgtcggcatggctggcgtggccatcgacaccgtcgaagacaccaagatcctgttcgatggaatcccgctggaaaaaatgtcagtaagcatgaccatgaatggcgccgtaatccctgtactggcaaactttattgtgacaggcgaagagcagggagtccctaaggagaagctgacagggaccatacagaatgatattcttaaagagttcatggtgagaaacacttatatttttcctccagagccttcaatgaaaataatagccgatatctttgagtacaccgccaaacatatgcccaagtttaatagcatttctatatccggttaccatatgcaggaagcaggtgcagacgctattctggaattggcctacaccctggctgatggacttgaatacagccgcaccggactccaggccgggcttacaattgacgagttcgccccacgcttgtcctttttttggggtattggcatgaacttctacatggagatagccaagatgcgtgccggtcggaggctgtgggcacacttgattgagaaaatgttccagcctaagaattctaagtctctgcttctgagggcccactgtcagactagtggttggtcactgaccgaacaggatccgtataataacattgtgcgcacggccattgaagccatggcggccgtttttggcggcacacagagcctccacaccaatagcttcgacgaggctctgggtctgcctacagtgaaatcggcccggatcgctagaaacacacagatcattattcaggaagaaagcggcataccaaaagtggccgacccttggggcggctcttatatgatggaatgtctgactaatgatgtttatgatgccgccttaaaactcattaatgaaatcgaagaaatggggggcatggctaaggcggtggccgagggcataccaaaactgaggatagaagagtgcgccgcccggcgacaggccaggattgatagtggttctgaggttatcgttggcgtaaacaaatatcagctagagaaagaggacgccgtggaagtcctggccatcgacaacacgagcgtacggaacaggcagattgagaagctgaaaaagataaagagcagtcgcgaccaggcactggcggagcgatgcctggccgcactgaccgagtgcgctgcaagtggcgatggcaatatcctggctctcgcagttgatgcctccagggccagatgcaccgtgggagagatcacagatgcccttaaaaaggtatttggagagcataaggccaacgaccgcatggtctctggggcgtacagacaagagtttggagagtctaaagagattacatccgccattaagagagtacacaagtttatggagcgcgaaggaaggcgtccccgcctgctggtagccaagatgggccaagacggccatgatagaggcgctaaggttatcgccactggcttcgcagatttaggatttgacgtcgacatcggacccttgtttcagacccccagagaggtcgctcagcaagctgtggatgctgacgtccatgcagtgggggtctcaacgctggcagcgggacataaaactctcgtgcctgagttgatcaaggaactcaattccctggggcgccctgatatccttgttatgtgtggtggagtcattcctccccaagattatgaatttctattcgaagtgggcgtctctaatgtctttggccctgggacaaggattccaaaggcagctgtgcaggtgttagacgatatagaaaaatgtctcgaaaagaaacagcaatccgtg

SEQ ID NO: 97 - DNA, 2250 bp, Artificial Sequence
  Codon optimized sequence that encodes an MCM polypeptide with the I671V mutation
atgttgagggccaagaaccagttgttcctcctgtctccacactacctgcgacaggtcaaggagagcagcggaagccgactcattcagcaaagactcctccaccagcagcagcccctgcaccccgagtgggccgcactggctaagaaacagctgaaaggaaagaacccagaggatctcatatggcatacgcctgaggggatcagcattaagcccctttacagcaagagagatactatggaccttcccgaagagcttcccggggtgaaaccattcacacggggtccctatccgaccatgtacacgttccgtccctggactatccggcagtatgctggattttctaccgtggaggagtccaacaagttttataaggataatatcaaagccgggcagcagggcctttccgttgcttttgacctggccacccatcgcggctacgattcagataaccctcgcgtaaggggtgatgtgggaatggccggtgtagcaattgacacggtggaagacacaaaaatcctgttcgacggtatccctcttgagaaaatgtccgtctcaatgaccatgaacggcgctgtgattcccgtactcgccaacttcattgtgacaggcgaggaacagggcgtccccaaagagaagctaaccggaaccattcaaaacgacatcttaaaggagttcatggtccgcaacacctacatattcccacctgaaccctccatgaagatcattgcagatatttttgaatacaccgcgaagcacatgcctaaatttaactctattagcatctccgggtaccacatgcaagaagcgggggctgacgccattctggagctcgcttacactttggcggatggactggaatacagcagaacggggctccaagctgggctgactattgacgagtttgcaccccgcctcagcttcttttggggcatcgggatgaatttctatatggaaattgctaagatgcgggctggccgtagactctgggcacacctcatcgagaaaatgtttcaaccaaagaactctaagagtctactgctcagggctcactgtcagacctccggctggagtctcacagagcaggacccttataataacattgtcaggacagcaatagaggctatggctgccgtcttcggcggtacccagagcttgcacaccaacagcttcgatgaagcactcggcctgccaacagtgaagtcggcgcggatcgctagaaacacccagatcataattcaggaggagagtggtattccgaaggtcgcagatccatggggggggtcctatatgatggagtgcctaacaaatgatgtatacgacgcagctttgaagctgatcaacgagattgaagaaatgggaggcatggccaaagcggtggcggaggggattccaaagcttcggattgaagagtgcgccgcccgccggcaggcccgaattgactcaggctcagaagtcattgttggcgtcaataaataccagctggaaaaggaggacgccgtagaagtgctcgctattgataatacatccgtgagaaacagacagattgagaagctgaagaaaataaagagctctcgcgatcaggctttagccgaaaggtgtctggctgcacttaccgagtgtgcagcgtccggagacggtaacattctggccctagcagtggatgctagcagagcccgctgcacagtgggcgagatcacagatgctttaaaaaaggtgtttggagaacataaggcaaatgaccgcatggtctcgggagcttatcgccaggaattcggcgagtctaaagagattacaagtgctattaaaagagtgcataagtttatggagcgggagggtaggaggcctcgattattggttgccaagatggggcaggatgggcatgaccggggagcgaaagtcattgcaactggctttgctgatctgggatttgatgttgacataggaccgctgttccaaactccacgcgaagtagcccagcaggctgtagatgcggacgtgcacgccgtgggggtttccaccctggctgcaggacataagacactggtgcctgaacttattaaggagctgaactccttagggaggcccgatatccttgttatgtgtggcggtgtgatccccccacaggactatgaatttctgtttgaagtaggcgtgtcaaacgtcttcggccccggcacacggatcccgaaggctgccgttcaagtcttggacgacatcgaaaagtgcctcgaaaagaagcaacagtctgtc

SEQ ID NO: 98 - DNA, 2250 bp, Artificial Sequence
  Codon optimized sequence that encodes an MCM polypeptide with the I671V mutation
atgcttagagccaagaaccagctgtttctcttgtctcctcattatcttagacaggtcaaagagagtagcgggtcgaggcttatacagcagcggcttctacatcagcagcagcctctgcaccccgagtgggcggcactagcaaagaagcaactcaaaggcaaaaatccagaggaccttatttggcacacgcctgaggggatatcgatcaagccgctttacagcaagcgcgacacaatggacctcccagaagagctccctggcgtgaaaccattcacccgcgggccctaccctacgatgtatacgttccgcccctggaccataagacagtatgccggttttagcactgtcgaagagtctaataagttctacaaagataatattaaagctgggcagcagggactgtccgtcgcttttgacctggcgacccatcgtgggtacgatagcgacaatccgcgcgtccggggcgatgttgggatggcaggcgtcgcaatcgatactgtggaggacaccaagatcctgtttgacggcatccccctggagaagatgtcagtgagcatgacaatgaacggtgctgtcatccccgtgctcgcaaactttatcgtcacgggagaagagcagggtgtgccgaaggagaagttaacagggaccattcagaacgatatcctgaaggagtttatggtcaggaacacctatatttttccacccgagccatctatgaagattatcgccgacatatttgaatatactgcaaagcatatgcctaaattcaatagtatttcaatctcgggctatcatatgcaagaggccggggccgatgcaatactggagcttgcttatacgttagctgacgggcttgagtatagtaggacggggcttcaagctggactgaccattgatgaattcgctcccaggctgtccttcttttgggggatcggtatgaatttctacatggagatcgccaagatgcgagctggccgcagactatgggcacacctcatcgagaaaatgtttcaaccaaaaaactccaaatcccttctcctacgggcgcattgccagaccagcggatggagcctcactgagcaggatccatataataatatagtgaggaccgctattgaggctatggctgccgtgtttggcggaacccagagcctgcacaccaactccttcgatgaagccctggggctccccacggttaaaagcgcgagaatcgctcggaacacacagattattatacaggaagaatctggtatccctaaggtggctgatccttggggcggatcctatatgatggaatgcttgacaaatgacgtgtatgatgccgccctgaagcttatcaacgaaattgaagagatgggcggcatggccaaggcagtagccgaaggcatccctaaactgcggatagaagagtgcgctgcacgccgtcaagctagaatcgacagtggcagtgaggttatcgtcggcgtcaacaagtatcagctggaaaaggaggatgccgttgaggtattggcgatagacaataccagcgtccgtaacaggcagattgaaaaactgaaaaagatcaagagctcacgcgatcaggctctagccgaaagatgcttagccgccctgacggagtgtgctgcaagcggcgacggcaacatcttggccctggccgtagatgccagcagagctcgctgcaccgtgggtgagatcactgatgccttgaaaaaggttttcggggaacataaggccaatgaccgcatggtgtccggcgcataccgacaggaatttggagagagtaaagagattacttcagccataaaacgtgttcacaagtttatggaaagagagggtaggagaccgcggctgctagttgcaaaaatgggccaggatggccacgacaggggtgctaaggtgatcgcgaccggatttgcagacttgggcttcgatgtggatattggcccgctgttccaaactccgcgagaagtggcccagcaagcagtcgatgccgacgttcatgcagtcggcgtcagtactctggccgccgggcacaagactttagttcccgaacttatcaaggagctcaatagtttggggagaccagacatcctggtgatgtgcggaggagttatccctccacaagactatgaattcctgtttgaagtgggcgtgtccaacgtcttcggccccggaacacgaatacccaaggcggcagttcaggttcttgatgatatcgagaagtgtttggagaaaaaacagcagtccgtg

SEQ ID NO: 99 - DNA, 2250 bp, Artificial Sequence
  Codon optimized sequence that encodes an MCM polypeptide with the I671V mutation
atgctgagagccaaaaatcagttgttcttgttaagtccacattacctgaggcaggtcaaagagtcaagcggcagcaggctcatccaacagagactgttgcatcaacagcagcctctccaccccgaatgggccgcacttgccaagaaacagttgaaaggcaagaaccccgaggaccttatctggcatacaccagagggaatcagcatcaaacccctatacagcaaaagggacactatggaccttccagaggagctcccaggcgtcaaaccctttacacgtggtccctatcctacgatgtacaccttcagaccttggaccatccgccagtacgccggctttagtacggtagaagagagcaacaagttttacaaagataacataaaagctgggcagcaaggactgtccgtggccttcgacctagcgactcaccggggctacgactccgacaatccaagggtccgtggcgatgtagggatggccggggtggcaatcgatactgtagaagatacaaaaattttgtttgacggcatccccctggagaagatgtcagtttccatgactatgaatggggccgtgatccccgtgttggcgaatttcatagtgacaggggaagaacagggagtacccaaggagaagctcacggggacgatccagaacgacatcttgaaagaatttatggtgcgcaatacttacatcttccccccggaaccttctatgaagatcattgccgacattttcgagtatacagctaagcacatgccaaaatttaattcaatctctatttcaggataccatatgcaggaggccggcgccgatgccatcttggagctagcctataccctcgctgatggactggaatactcaaggactgggttgcaggcgggactaacaatcgacgaattcgccccacgtcttagctttttttgggggattggaatgaacttctatatggaaatagcaaaaatgagagcgggcagaagactctgggcgcatctcatcgaaaaaatgttccaacccaagaattccaagagcctcctgctgagagctcattgccagacatctggctggtcgttaaccgaacaagacccctataacaacatcgttcgcactgccatcgaggccatggcggcggtattcggtggaacacagtcgctgcacacaaacagtttcgatgaggcccttggcctcccaactgttaagtctgcgagaattgcccggaacacgcagattataatacaggaagagtctggcattccaaaggtcgcagacccctgggggggatcctacatgatggaatgtctgacaaatgacgtttatgatgcggcccttaagttgataaacgagatcgaagaaatgggaggcatggctaaagccgttgcagaaggcattcccaagctgcgcatcgaggagtgcgccgctaggaggcaggctaggatagactcaggcagcgaagtcattgtaggcgtgaataagtatcagctcgagaaggaggatgcggtggaagtgcttgcgatcgacaatacctctgttcgcaaccggcaaatagaaaaacttaagaaaatcaagtcctcccgcgatcaggctttagccgaacggtgcctggccgctttaacggagtgcgccgcttcgggggacggtaatattctggctctcgccgtagacgcctccagagccagatgcacggtgggtgaaataacggacgctctgaagaaggtgtttggggaacacaaagcgaacgaccgcatggtgtcaggtgcttaccgacaggaatttggtgagagtaaagagatcaccagcgccattaaacgggtgcataagtttatggagcgagaaggccgtagacctaggctactggtggctaagatgggacaggatggccatgaccgcggggcaaaggtcatcgccaccggctttgctgaccttgggttcgacgtcgacattggtcccttgttccagacccctcgggaagtggcccagcaagccgtggacgctgacgtgcacgctgtgggcgtgtcaacactggccgccggacacaaaactcttgtccccgaactgatcaaggagctgaactcattggggcggcccgatattttggtgatgtgtggaggagtcatcccacctcaagactacgagttcctattcgaagtgggcgtctctaacgtctttgggcctggtactcgcatcccgaaagcggccgtgcaagttttagacgacatagaaaaatgcctggagaaaaagcagcagtccgtt

SEQ ID NO: 100 - DNA, 2250 bp, Artificial Sequence
  Codon optimized sequence that encodes an MCM polypeptide with the I671V mutation
atgttgcgggctaagaaccaacttttccttctctctccccactacctgagacaggtgaaggaatcaagcggctcccgactgatccagcagcgactgctgcatcaacagcaacccctacatccggaatgggccgcgctcgctaagaaacaactgaagggcaaaaatcccgaagatttgatctggcataccccagagggcatttcaattaaacctctctatagtaagagagacactatggacctgccggaggagttgcctggggtcaagccatttacccgggggccataccccacgatgtatactttccgcccatggacgatccggcagtatgctggtttttcaacggtggaagagtcgaacaagttttataaagataatatcaaggccggccaacaggggttaagtgtcgcctttgatctggccacgcaccgtggatacgacagcgataatcctcgcgtgagaggcgatgtggggatggcaggggtcgccattgacaccgtcgaagacactaagatcctcttcgatgggatccccttagagaagatgagtgttagtatgacaatgaatggagcagttatacctgttttggccaatttcatcgtaaccggcgaggagcaaggggttcctaaggagaagctcacaggtactatccagaacgatatcctgaaggagttcatggttcgcaatacctatatctttcctccagagcccagcatgaaaatcatcgcagatattttcgagtatactgctaaacatatgccaaagtttaattcaattagcattagcggatatcacatgcaagaagcaggggccgatgcaatcctggagctggcgtatacgcttgccgacggcttagaatactcacggacaggactgcaagcaggactgactattgatgagttcgcccctcggctgtccttcttttgggggattgggatgaatttctatatggaaattgcaaagatgcgcgcgggccgacgactgtgggcccatctaatcgaaaagatgtttcagcctaagaactccaagtctttactgctgcgtgctcactgccagactagtgggtggtcattgacagagcaggacccatataacaatatagtgaggaccgcaatcgaggctatggctgccgtcttcggaggaacgcagagcctccatactaacagctttgatgaggccctgggccttcccactgtaaagagcgcccgcatcgcaagaaacactcagatcattatccaggaagaatctggaatccccaaagtcgcagacccctggggcggctcctatatgatggagtgcttgactaacgacgtgtacgatgccgccctcaagctgattaatgaaatcgaagagatgggcgggatggccaaagcggttgctgagggtatccccaaactgcgaatcgaagagtgcgctgcacgccgccaggctcgtatagattccgggagcgaggtaattgttggggtaaacaaataccagctggagaaggaagacgctgttgaagttctagctattgacaacacatccgtccggaatcggcagatcgagaaacttaagaagattaagagtagtcgcgatcaggccctcgcggaaagatgtctggccgccctgaccgagtgcgccgcaagcggtgatggcaatatactggccctcgctgtggatgccagccgagcccggtgcaccgtgggcgagattactgacgccctgaagaaagtgttcggggaacacaaggccaacgataggatggtgagtggcgcctatcggcaggagttcggagagtctaaagaaatcacaagtgccatcaaacgcgtgcacaaattcatggaaagagaaggtcggcgcccgcgtttgctggtggcaaagatgggtcaggatggtcatgaccggggcgctaaggtcattgccaccggcttcgctgacctaggattcgacgtggacatcgggcccctgttccagacccctcgggaggtggctcaacaagccgtggacgccgatgtacacgctgtgggtgtttctaccctcgcggctgggcataaaacattggtgccagaactgattaaggaactgaatagtctgggccgcccggatattttagtcatgtgtggtggagtgatccccccgcaggactacgagttcctatttgaggtgggagtgagcaatgttttcggccctggcactaggattcctaaagccgccgtgcaggtgttagatgacattgagaaatgcctcgagaaaaagcaacagtctgtg

SEQ ID NO: 101 - DNA, 2250 bp, Artificial Sequence
  Codon optimized sequence that encodes an MCM polypeptide with the WT mutation
atgctccgcgctaaaaatcagctgtttctactgtctccgcattaccttcggcaagtcaaagaatcctctggcagccgactcattcaacagcgcctgctgcaccagcagcagcctctccatcccgagtgggctgctctggccaagaagcagctcaaggggaaaaatcctgaggatctgatctggcatacccccgaagggatcagcatcaagcctctgtactctaagcgggataccatggatctgccggaagagttacctggcgtgaagcctttcaccagggggccttatccgacaatgtataccttcagaccttggaccattcggcagtacgctggattcagcaccgttgaagaatctaataagttttataaagataatattaaagcgggacaacaggggctgtcagtggccttcgatctcgctacccaccgtggttacgacagtgataaccctcgagttagaggtgacgtgggcatggcgggcgtagccatagacaccgtagaagacaccaagattctgttcgatggcatccctctggaaaagatgagcgtctctatgaccatgaatggggccgtcattccagtgcttgccaactttattgtcacgggcgaggagcagggggtccccaaagaaaaactgaccgggactatccagaacgatattctgaaggaattcatggttcggaatacctacatcttcccaccagagccaagtatgaaaataatcgcagatatcttcgagtataccgctaagcacatgcccaagttcaactctatttctatttcaggctaccatatgcaggaggccggcgccgacgcaatccttgaattagcctatacactagctgatggactcgagtatagtcgtacgggtttgcaggccgggctaaccattgacgagttcgcccctcgactttccttcttctggggaataggaatgaacttctatatggaaatcgccaagatgcgagccggaagacgactgtgggctcaccttatcgaaaagatgttccagcccaaaaacagcaagtccctgcttctgcgcgctcactgccagacgagtggctggagtcttacagaacaggatccatataacaacattgtgcggactgcgatcgaagccatggccgccgtattcggagggactcagtcattgcacacaaacagctttgacgaggccctgggcttgcccacagtgaaaagcgctaggattgccagaaacacgcagatcatcatccaagaagagagtggcatacctaaggtggccgacccctgggggggatcctatatgatggaatgcctgacaaacgatgtgtacgatgccgctcttaagctgattaacgagattgaagagatgggcgggatggcaaaagccgtggccgaggggatccccaagttgcggatcgaggagtgtgcagctcgaagacaggctcgaattgatagcggcagcgaagtgatagtgggcgtaaataaataccaacttgagaaggaggatgcggtggaagtgctagccatcgataacaccagcgtgcggaaccgacagattgaaaaactgaagaagattaaatcttcacgggaccaggctctagccgagcgttgtctcgcggcgctgaccgagtgcgcagcgtctggagatggcaatattctcgcgctcgctgtggacgcgagtcgggcgcggtgtaccgtgggcgagatcacggatgctctcaaaaaggtttttggcgagcacaaagccaatgatagaatggtgagcggggcttacaggcaagaattcggggaatcaaaagagatcacctccgccattaaaagggtccacaagtttatggaacgggagggaaggcgccccagactgttagtcgcaaagatgggtcaggatgggcacgatcgcggtgcaaaagtgattgccaccggcttcgccgatctgggcttcgacgttgatatcgggcctctgttccagaccccaagagaagtggcacaacaggcggtagatgctgacgtccacgccgtcgggatatctactctggccgcagggcacaaaacattagttccggagctcatcaaagaactgaattcgctcggacggccggacattctcgtgatgtgtgggggggtgatccctccccaggactacgagttcctcttcgaggtgggagtgagcaacgtcttcgggccaggtacacgtatacccaaagcagctgttcaggtgctagatgacatcgagaagtgcttagaaaaaaagcaacagtcagtc

SEQ ID NO: 102 - DNA, 2250 bp, Artificial Sequence
  Codon optimized sequence that encodes an MCM polypeptide with the WT mutation
atgctgagagcaaaaaaccaactcttccttctgtctccacactatctccggcaggtgaaggagtccagtggctccagactgattcagcagcgacttctgcaccagcagcagccacttcatcccgagtgggccgccttggcaaaaaaacaactgaaaggtaagaacccggaagatttaatttggcatacaccggaaggaatttctatcaaacccctgtactctaagagggacacaatggatctgccagaggagctgcctggggtcaagcccttcacgagaggcccctaccccaccatgtatacgttccggccttggacaatcaggcaatacgccgggttttcaacagtggaagagtcgaacaagttttacaaagacaatattaaggccggacagcagggcctttccgtagcattcgatctggcaacacaccgcgggtacgatagtgataacccccgggttaggggcgatgtaggtatggccggggtagctattgacaccgttgaagacaccaagatcctttttgatggcatcccactcgagaagatgtctgtgagcatgacaatgaatggggcggtgataccggtcctggcaaacttcattgttactggtgaggagcagggcgtgcccaaggaaaagttaaccggaaccatacagaatgatatcctcaaagagtttatggttagaaatacctacattttcccacccgagccttctatgaaaatcatagccgacatctttgagtataccgctaagcacatgccaaagttcaactctatttccatctcaggatatcatatgcaggaagccggcgccgatgcgatcctagaactcgcctacacactggcggatggactcgaatattctcggaccggcctgcaggccggcttaaccattgacgagttcgcccccaggctgagctttttttggggcatcggaatgaacttttatatggagatcgcaaagatgcgggccggcagacgcctgtgggcccacctcatagagaagatgttccagcctaaaaatagcaagtcattactcctcagggcacattgccagactagcggatggtcattgactgaacaggatccttataataatatcgtacgtacggcaatcgaggcgatggccgcggtgtttggggggacccaatccctgcacactaattccttcgacgaagccctggggcttcctaccgtcaagtcggcaagaatcgccaggaacacccagattataattcaggaagaatccggtattcccaaggtcgcagacccgtgggggggctcttacatgatggaatgtttaaccaatgacgtgtacgatgccgccctaaagctgatcaacgaaattgaggaaatggggggcatggcgaaagccgttgcagagggcatcccaaaattaagaatcgaggaatgcgcggctcgccgccaggcgcgcatcgatagtggctccgaggtgatcgtaggggttaataagtatcagctggaaaaagaggatgcagtggaggttcttgctatcgataatacttccgtgaggaaccggcagatcgaaaagctgaagaagatcaagtccagccgtgatcaggctctggccgaacgctgcttggccgcactgacagagtgcgccgcctctggcgacggcaatatcctagccctggctgtggatgcgtcacgggcccgatgtacagtcggtgagataacagatgctcttaagaaggtcttcggcgagcataaggctaacgaccggatggtgtcaggtgcgtaccggcaagaatttggggagagtaaggaaatcacctcagcaataaagcgggtccataagttcatggaacgggaaggacgccgcccccggcttttagtggcaaagatgggccaggatggtcacgaccgcggcgcaaaagtgatcgctaccggattcgccgaccttggatttgacgttgatattggtcccttgttccagaccccaagggaggtggcccaacaagccgtcgatgccgatgtgcacgccgttggtatctctactctcgcagcagggcataagacactcgtgcccgagctcataaaggaactgaatagcctcggtcgaccggatatactcgtcatgtgtgggggcgtgattccccctcaggattatgagttcttgtttgaggtgggcgtgagcaacgtcttcggtccaggcaccagaattcccaaggccgctgtgcaggtgttagacgatattgaaaagtgcttggaaaaaaagcagcagagcgtg

SEQ ID NO: 103 - DNA, 2250 bp, Artificial Sequence
  Codon optimized sequence that encodes an MCM polypeptide with the WT mutation
atgttacgcgctaagaaccagctgtttctgctgagtccccattacttgagacaggtaaaggagtcatccgggagcagattgatacagcagcgtttgctgcaccagcagcagccactgcatccggagtgggccgccttagccaagaagcagttaaaggggaagaatcccgaggacctgatttggcacacacccgaagggatttctatcaagcctctctattctaaaagggacaccatggatctgcccgaagagctgccgggagtcaagcccttcacaagagggccataccctacgatgtatacattcagaccatggacgattaggcagtacgctggattcagtactgtggaagaatcaaataaattctataaggacaatatcaaggccggccaacaggggttatcagtggctttcgacctggctactcaccgaggctatgactccgacaatccccgggtccggggggacgttggaatggcaggagtggcaatcgatacagtcgaggataccaagatcctgttcgatggtatccctctggagaaaatgtctgtctccatgaccatgaacggggcagttatccccgtgctggctaatttcattgtaacaggagaggagcagggggtaccgaaggagaagcttaccggtacgatacaaaatgatatcctgaaagagtttatggtgaggaacacttacatcttcccacctgagccatctatgaaaataatcgcagacattttcgaatataccgccaaacatatgcctaagttcaactcaatcagcatctctggttatcatatgcaggaggccggcgctgacgccattctcgaactggcatatacactggcagacggactggaatacagccgtactgggttacaggctggtctcactatcgacgaatttgccccgcgactgagcttcttctggggtatcggcatgaacttttacatggaaatagcaaagatgcgtgctgggcgtcgcttatgggcacacctgatcgagaaaatgtttcagcctaagaatagtaaaagtttactcttaagggcacactgtcagacaagcggctggtctttaaccgagcaggatccctacaacaatatcgtgagaactgcgattgaggcgatggccgcagtttttggggggacacagtccttgcatacgaatagcttcgatgaggcactggggctgcctactgttaagagcgctaggattgctcgaaacactcaaatcatcattcaggaagagagcggaatccctaaggtagctgacccttggggtgggtcgtatatgatggagtgtctcaccaatgatgtgtatgatgcagcgttgaagcttatcaatgagattgaggagatgggcgggatggccaaggctgtggctgaagggatccctaaactgcgaatcgaagagtgtgcagcgagacgacaagcccggattgactccgggtcagaagtcattgtaggcgtgaataagtatcagctggagaaagaggacgcggttgaagtgctcgcaatcgataatacctctgtccgcaatagacagatcgagaaattgaagaagatcaagtccagccgggaccaggccctggccgagaggtgtctggccgccctgacggagtgtgcagcatcaggggatgggaacatactggctctggccgtcgatgcttcccgggcaagatgtaccgtgggcgagatcaccgacgcactgaagaaggtgttcggcgaacataaggcaaacgatagaatggtatccggcgcctaccggcaggagtttggagagtccaaggagatcacatctgccattaaaagggtacataaattcatggaacgggaaggtaggaggccaagactgctcgtcgctaagatggggcaggacggacatgacaggggtgccaaggtgattgctacagggttcgctgaccttgggttcgacgtggacataggccctctgtttcagacacctcgagaggtggcgcaacaggctgtcgacgccgatgtgcatgccgttgggatttctacgctggctgcgggtcataagaccctagtgccagaattaattaaggagttgaactccttggggaggccagacatcctcgttatgtgtgggggggtgattccccctcaagactacgagttcctgttcgaggtcggagtttctaacgtgtttggcccgggaacacggatcccaaaggccgccgttcaggtgttagatgacattgaaaagtgtctggagaagaaacagcaatcagtt

SEQ ID NO: 104 - DNA, 2250 bp, Artificial Sequence
  Codon optimized sequence that encodes an MCM polypeptide with the WT mutation
atgctgcgggcaaaaaaccaattgtttctgctatcccctcattaccttagacaggtcaaagaaagtagcggatctcgcctcatccagcaacggctcctgcaccagcagcaacccctacaccctgaatgggccgcactggctaaaaaacaactgaaaggaaaaaaccctgaagacttaatctggcacacccccgaaggcatttctatcaaacctctgtacagtaaaagagacaccatggatctgccagaagaactgcccggggttaaacctttcacccgcggcccttatcctactatgtatacctttcgaccatggactatccgccagtatgcaggcttctccactgtcgaagagtcaaacaagttctacaaggataatattaaggcaggtcagcagggactgtcagtagcttttgacttagctactcatagaggctatgatagcgacaaccccagagttagaggcgacgtaggaatggcaggagtggctatcgatacagtggaggacacaaagattctgtttgacgggattcctttggagaaaatgtccgtgtccatgaccatgaacggtgctgtgatccctgtcctcgctaattttatcgtgacaggggaggaacagggcgtgcctaaggagaagcttacaggtacaatacagaacgatattctcaaagaattcatggtaagaaacacttacatatttccaccagagccctccatgaaaatcattgcggatatctttgagtacactgcgaagcacatgcccaaattcaatagcatcagtattagcgggtaccacatgcaagaagctggggcagatgccatactggagctggcctatacgcttgccgatgggcttgaatattctcgcacaggcttgcaagcaggcctgactatcgatgagttcgctcccaggttgagtttcttttggggtataggcatgaacttttatatggagatcgcaaaaatgcgtgctggaaggcgattgtgggctcacctcatcgagaaaatgttccagccaaagaactcaaagtccctgcttcttcgggctcactgccagacctccggctggagtctgaccgaacaagacccatataataacattgttcggactgcaattgaagcaatggcagccgttttcggaggcacccagtccttgcacaccaatagctttgacgaggctctcggactgccaaccgttaagagtgctagaatagctcgaaatacacagataatcatccaggaagagtctggtattcccaaagtggccgacccttggggcggcagttacatgatggagtgtctcaccaacgacgtgtacgatgcggccctgaaattgataaacgaaatagaagagatgggtggcatggcaaaggcagtcgctgaagggatccctaagcttaggatagaagagtgcgcagccaggaggcaggccaggatcgattccggatcagaggtcattgtcggtgttaataagtaccaactggagaaggaggacgctgtggaagtactggcaatcgacaatacgtctgtgcggaacaggcagattgagaagcttaagaaaatcaaatcctcccgagaccaagcgctggccgagcgatgtttagcagctctgaccgagtgcgctgcatctggtgatggcaacattctggcactggccgtagacgcctcccgggccaggtgtacagtgggagaaatcaccgacgcccttaagaaagtgttcggggagcacaaggccaacgacagaatggtctctggtgcctaccgacaagagttcggagagtccaaggaaattacttctgccatcaaaagagtacacaagttcatggaaagagagggaaggagaccccgccttctcgtggctaagatgggccaggacggccatgaccggggcgcaaaggtgatcgctactggctttgccgatctcggttttgatgtagacatcggccctttgtttcagaccccccgagaagtcgctcagcaagccgtagacgctgacgttcacgctgtcggaattagcacacttgctgctggacacaagaccctcgttcctgaattaattaaggagctgaacagcttgggccgacccgacatcctagtgatgtgtggtggcgtgataccacctcaagattatgaattcctgttcgaagtgggagtttcaaacgtttttggccctggcactcggattccaaaggcagccgtgcaggtcctagatgacatcgagaagtgtcttgagaaaaagcagcagagcgtt

SEQ ID NO: 105 - DNA, 2250 bp, Artificial Sequence
  Codon optimized sequence that encodes an MCM polypeptide with the WT mutation
atgctgagagccaagaatcagttgtttttgttgtccccacattatctcaggcaggtgaaggagtcctccgggtcaaggttaattcagcagcgcttacttcaccagcagcagcccttgcaccccgaatgggccgcgctcgcgaagaagcagttgaaagggaaaaaccctgaagacctcatttggcatacccccgaaggcattagcatcaaaccactgtatagcaaacgggataccatggaccttcccgaagaactccccggagttaaaccttttactagggggccctaccccactatgtatacctttcggccttggactattcgacagtacgcgggattctccacagtggaggaatcaaataaattttataaggacaatatcaaagctggacagcagggcctgagcgttgccttcgacctcgcaactcacagaggctatgattcagacaatccgcgagtgcgcggcgatgtcggaatggctggagtagcgatcgatacagttgaagacactaaaattctattcgatggaattcccctcgaaaaaatgtccgtgtctatgactatgaacggggcagtgattccagttcttgccaatttcatcgttacaggtgaagaacagggagtgcccaaggaaaaactcacagggaccatccagaacgacatcctcaaggaatttatggtacgcaacacctacatatttccaccagaaccatctatgaaaataatcgctgatatcttcgagtatacagctaagcacatgcccaaattcaatagcatctctatttcgggctatcacatgcaagaggcaggcgccgatgccattctggaactcgcctacaccttggcggatggcctcgagtactctcggaccgggctacaagcggggctcacaattgatgaattcgctcctcgcctgtcttttttttggggaatcggtatgaatttctacatggaaatcgcgaaaatgcgagcaggtcggcgcctgtgggcccacctgatcgagaagatgtttcagcctaagaattcgaagtctctgcttctgcgcgctcactgtcagacatccgggtggagtttgaccgaacaggacccatacaataatatagtgaggactgccattgaagcaatggcagccgtgttcgggggtacccagtccctccataccaattctttcgacgaagccctgggactgcctaccgtgaagagcgccagaatcgcaaggaatacccagattattattcaggaagaatccgggatccccaaggtggccgacccatggggagggtcctacatgatggaatgcctcactaacgacgtgtatgatgcagcccttaaactgatcaacgagatagaagagatggggggaatggccaaggcggtagctgagggcatccccaagctccgcatcgaggagtgtgctgcccgcaggcaagccaggatagactccgggagtgaggtcattgtaggtgttaacaagtaccagctggagaaagaagacgccgtggaggtccttgccattgataataccagcgttaggaatcgacagatcgagaagctgaaaaaaatcaaaagttcaagagatcaagcattagcagaaaggtgtctggctgctttgacagagtgcgcagcctcaggggacgggaacattcttgcactcgctgtggatgcctcacgggctcggtgcactgttggcgagatcacagatgccctgaaaaaagtgttcggcgaacacaaagcaaacgatcggatggtgagtggagcctataggcaagagttcggcgagagcaaggaaatcacctcagccattaaaagggtgcacaagttcatggagcgagaaggccggagaccaagacttcttgttgcgaagatgggccaggacggccacgatagaggagccaaggtcatcgctactggattcgcagacctcggattcgacgtcgacatcgggcccctgttccagacaccccgtgaagtcgctcaacaagcagtggatgccgacgttcatgctgtcggcattagtacactggccgccggacacaagacccttgtcccggagttgattaaagagttgaactccctgggccggcctgacattttagtgatgtgcgggggcgtcattccaccccaggactacgaatttctgtttgaagtaggcgtgagcaacgtattcgggcctggcacacgaattccaaaagccgcagtgcaagtactggacgatatagagaagtgtctggagaaaaagcagcagtcagtg

SEQ ID NO: 106 - DNA, 2250 bp, Artificial Sequence
  Codon optimized sequence that encodes an MCM polypeptide with the WT mutation
atgctgagggccaaaaaccagttgttcctactgagccctcattatctcaggcaggtgaaggagagttccggttcccgtctgatccagcagcggctgctgcaccagcaacaacctctccaccccgagtgggccgctctggcgaagaagcaactcaaaggaaagaatccagaggatcttatatggcatacacctgaaggaattagcattaagcccctctattccaagcgtgacacaatggacctgcctgaggaattacctggagttaaacccttcacgcgcggtccctacccgacaatgtatactttccgaccctggactatcaggcagtacgcaggattcagcaccgtggaggagtcaaacaagttctataaggacaacatcaaggccggccagcaagggctttctgttgcattcgacctggccacgcaccggggttacgactcggacaatccaagggtccggggcgacgtcggcatggcgggagtggccattgacacagtagaggacacgaagattctatttgacggtatccctctcgagaagatgtccgtctcaatgaccatgaatggcgcagtcatccccgttttggccaatttcatcgtcaccggtgaggagcagggagtacctaaagagaagctgacgggaacgattcaaaacgatatactgaaggaattcatggtccgcaacacttatatttttccccccgaaccaagcatgaagataatcgctgatatatttgagtacacagcaaaacacatgcccaagttcaactccataagtatcagcgggtaccatatgcaggaggccggagctgacgcaatcctggaactggcatataccctggcagacgggttagagtacagcaggacaggcttgcaagcgggcctcacaatagacgaatttgccccacgattgtcatttttctggggcatcggaatgaatttttatatggaaatcgccaagatgcgggccggacggcggctctgggctcacctcatagagaaaatgtttcagccaaaaaattcaaaaagcctgcttcttcgggctcattgtcagacttcagggtggtccctgacggaacaggatccctataacaacattgtgcggacagctatagaagcaatggcggccgtgttcggcggcacgcagtccctacacactaatagtttcgacgaggccttgggcttgcctacagtcaaatccgccagaatagccagaaacactcagattataattcaggaagagagtggcatcccaaaagtggcagatccatggggaggatcctatatgatggaatgtctgaccaatgatgtctacgatgccgccttaaaactgataaatgaaattgaagagatgggagggatggcaaaggcagtggctgagggaattccgaaactgcggatcgaggaatgcgctgccaggagacaggcacggatcgattctggttccgaggtgatcgttggcgtcaataaataccagctcgagaaagaagacgccgtggaggtgctcgcgatcgacaatactagcgtccggaaccgacaaattgagaagcttaagaaaattaagagctcaagagatcaggccctggcagagcggtgcctagcagccctcaccgagtgcgctgccagtggtgatggaaatattctggccctcgctgtggacgcctctagagcgcggtgcacagttggcgaaatcactgacgctctcaagaaggtctttggagaacataaggccaacgaccggatggtctccggcgcttatcgacaagaattcggagaatcaaaagaaatcactagcgccatcaagcgtgtccacaagttcatggagagagagggtcgcagaccaagactgctggtggcgaaaatggggcaggacggacatgatcggggagccaaagtaattgctactggttttgcagatcttggctttgatgtggatattggtccattatttcagactccccgcgaagtagctcagcaggcagtcgatgctgatgtgcacgcagtgggaatcagtaccttggccgcagggcacaagaccctagtgcccgaactaatcaaggagctgaattccctcggaagaccggacattttagtaatgtgcggcggcgtcatacccccacaggactacgagtttctgtttgaggtaggagtgtctaacgtatttggccctgggactaggatccctaaagctgctgtgcaggtgttggacgatatcgaaaaatgtctcgaaaagaagcagcagtccgtt

SEQ ID NO: 107 - DNA, 2250 bp, Artificial Sequence
  Codon optimized sequence that encodes an MCM polypeptide with the WT mutation
atgctccgcgccaagaatcaactcttcctgctgtcccctcattatctgagacaagttaaagagagttccggcagtcgcttaattcagcagagactgctccatcagcagcagcctcttcacccagaatgggccgcactggctaagaagcaacttaagggaaaaaacccggaggaccttatttggcacacacccgaaggtatatctatcaagccactgtacagcaaaagagatacgatggacctgccagaggagctccccggggtcaaaccgttcaccagagggccctaccctaccatgtacacctttcgtccgtggacaattaggcaatacgccggtttcagcacagtggaggagagcaacaagttctataaagataatattaaagccggacagcaggggcttagtgtggcctttgacttagccactcatcgggggtacgactccgacaatcccagggtgcggggcgacgtgggcatggccggagtcgcaatagatacagtcgaagacactaagattctcttcgacggcattcctcttgaaaaaatgtccgttagtatgaccatgaacggtgccgttatcccagtcctcgccaacttcatcgtgacaggagaggagcagggagtgccaaaagagaaactgactgggactatccagaatgacatactaaaagagtttatggttcgaaatacgtatatcttccctccggaacccagcatgaagatcattgcagacatctttgagtatactgcaaaacacatgcctaaatttaactccatctcaataagcggatatcacatgcaagaagcgggtgccgatgccatccttgagttagcttacacattggcggatggacttgaatactcccgtactgggctccaggcagggctaaccattgatgagtttgctccacgcctctcctttttctggggtataggcatgaatttctacatggagatagccaagatgcgtgctggcagacggttatgggcccaccttatagagaaaatgttccagccaaagaactccaaatcacttctgctccgtgcccattgccagacatctggttggtcactgactgagcaggatccatacaataatatcgtgcgcacagcaatcgaggctatggcggcagtgttcggcggcacacagtcactccataccaattctttcgacgaggcactcgggcttccgactgtaaagtctgccagaattgcccgtaacacacagatcattatccaggaagagagcggaatccccaaagtcgctgacccctggggcggttcctatatgatggaatgtctgaccaacgacgtgtacgacgctgccctgaagctcatcaatgagatcgaagaaatgggaggtatggctaaagccgtcgcagagggcattcctaagctgcgcattgaggaatgtgccgcacggaggcaggccagaatcgactcaggaagcgaagttatcgtgggagtgaataagtaccagctagaaaaggaggatgcagtcgaggttctcgctatcgacaataccagcgtgaggaataggcagattgagaaattaaaaaagattaaatcatcaagggaccaagcccttgccgagagatgtctggctgcgttgacagagtgtgcggcctcgggtgacgggaacattctggcgctggccgtggatgcatccagggctcgctgcactgtgggggaaattactgatgctctcaagaaggtattcggagaacataaggccaatgataggatggtgtccggggcctaccgccaagaattcggggagagcaaagaaatcaccagcgccataaagcgcgtgcacaaattcatggagagggaaggaagaagacctaggctcctggttgccaagatggggcaggatggacacgaccggggagccaaggtcatagccactggattcgccgacctcggcttcgatgtcgacatcgggcccctgttccagactcccagagaagtggcgcaacaggccgtcgacgcggacgtacacgcagtgggtatatcaacactggcggccggccacaagaccctagtgccagagcttattaaagagctgaattctctgggccgtccagatattctcgtgatgtgtggaggagtgatacctccacaggactatgaatttctgttcgaagtgggcgtgagcaatgtttttggcccggggacccggatcccaaaagcagctgtgcaagtgcttgacgacatagagaaatgtctcgagaaaaaacagcagtcagtc

SEQ ID NO: 108 - DNA, 2250 bp, Artificial Sequence
  Codon optimized sequence that encodes an MCM polypeptide with the WT mutation
atgctcagggctaagaatcagctgttcctgctgagcccccactacctgaggcaggtcaaggagagctccgggtctagactcatacagcagcgactcctgcaccaacagcaaccgctccatcctgagtgggcggccttagccaaaaaacaactgaaagggaaaaatcctgaggatctgatttggcacactcccgagggaatctcaattaagccactctatagcaaacgggacacaatggatttgcccgaagagctcccgggagttaagccattcacccgcggcccttaccctaccatgtacacatttcggccctggactataagacaatatgcagggtttagtactgtagaagaatccaataagttctataaagataacatcaaggctgggcagcaaggactctctgtagctttcgacctagctacccacagaggatatgatagcgataacccaagagtgcgaggggacgttggaatggcaggcgtggctatagacaccgtagaagatacaaagattctgtttgacggcataccactggagaagatgagcgtgtccatgaccatgaatggggcggtgatacccgtgctcgccaattttatagtaacaggcgaagaacaaggcgtgcccaaagaaaagctgacaggtacaatccagaacgacattcttaaagaattcatggttcgaaacacctacatttttccccctgagcccagcatgaagataatcgctgatatctttgaatacacagccaagcacatgcctaagtttaacagtatctccatcagcggctaccacatgcaggaggccggtgcagacgctatcctggagctggcctacactttggccgatgggctggaatatagccgtactggactgcaggcagggcttacaatcgacgagttcgcacccaggttaagcttcttctggggcattggtatgaatttttatatggaaattgctaagatgagggcaggccgcaggctgtgggcccacttgattgagaagatgttccagccaaaaaacagcaaatccttgttactgagggcacattgtcagacatccggatggtccttaaccgagcaggatccctacaataacatagtgagaacggccatagaagcaatggccgctgtcttcggaggcacccaatccctacacacaaactctttcgatgaagcactgggactccccacagtgaagagcgctagaattgctcgcaatacccaaataatcatccaggaggagagtggcattcccaaagtcgcagacccgtggggaggctcgtacatgatggagtgtctcaccaatgatgtctatgacgctgcattgaagctgataaatgaaatcgaagagatgggggggatggcaaaagctgttgccgaaggcatccctaagctgaggattgaggaatgcgccgcgcgccgccaggcccgtatagacagtgggtccgaggttatcgttggggtgaataagtatcagttggaaaaagaagatgctgttgaggtgcttgcaattgacaacacctccgtgcgaaatagacagattgagaaattgaagaaaatcaaatcttctcgggaccaagccctggccgagcgatgtctggctgcgctgaccgaatgtgcggcctccggcgacggcaacattctggccttggctgtggatgcatcgcgcgctcgctgtacggtgggagagattactgacgcactcaagaaggtctttggagaacacaaggccaatgatcgaatggtttccggcgcataccgacaggaattcggtgagtccaaggagataactagcgccataaaacgggtgcataagttcatggaaagagaagggcgaaggcctagactgcttgttgctaaaatgggacaagatggtcatgatcggggagctaaagttatcgcgactggatttgccgatctcggatttgacgtggacataggccccttattccagaccccccgtgaggtcgctcagcaggccgtggacgctgacgtgcatgccgtcggtatctcaacccttgccgccgggcataagactctggtgcccgaactcattaaagaactgaactccctgggccgccccgacatccttgtcatgtgcggcggcgtcatcccaccccaggattacgaatttctcttcgaagtgggtgtgagcaacgtctttggccctgggaccagaattccaaaggcagcggtccaggtcctggatgacatcgaaaagtgtctcgagaagaagcagcaaagcgtg

SEQ ID NO: 109 - DNA, 2250 bp, Artificial Sequence
  Codon optimized sequence that encodes an MCM polypeptide with the WT mutation
atgctcagggccaaaaaccaactgttcctccttagcccgcactatctgaggcaagtcaaagagagcagcggatcacgactaatccagcagaggctgttacaccaacagcagcccctacatcccgaatgggcagcactcgctaagaagcagttgaagggtaaaaaccctgaagatctgatttggcacactccagaggggatttcaatcaaacctttgtattctaagagggataccatggatctgcctgaggaactgcctggcgttaaacctttcacccgaggaccgtatcccacaatgtataccttccggccctggactatcaggcaatacgcagggttctctaccgtggaggagtctaacaaattctataaggataatataaaggctggccagcaggggctgtcagtagcatttgatctggccacacaccgtgggtacgactcagacaaccccagagtcaggggggacgtcgggatggcgggcgtggctatagatactgtagaggacacgaaaattttattcgacggtattccactggaaaagatgagtgtgtctatgacaatgaacggcgctgtgatcccagtgctcgccaactttattgtcaccggggaagagcagggagtgcccaaagagaaactgaccggcaccatccagaatgatatcctgaaagaattcatggtccgaaacacatacatctttccgcctgaaccctctatgaagatcattgctgacatattcgaatacaccgccaaacacatgcccaagttcaatagcatttccatttcaggataccacatgcaggaggctggagccgatgctattcttgagttggcttacacactcgccgacgggctggagtattcccgtacagggcttcaggccggacttaccattgacgagtttgcgccaagattatcatttttttggggaattggtatgaatttctacatggagattgccaaaatgcgggcagggaggcggctctgggcccacctgattgaaaagatgtttcagcctaaaaactcaaaatctctgttactgagggcccattgtcagacctccggatggagcttaactgagcaggacccatacaacaatatcgtacgaaccgcaatagaggccatggccgccgtgttcggcggcacccaaagcctgcacaccaatagcttcgatgaggccctaggcctaccgacagtgaaaagcgcaaggattgcgcgtaacacgcagattattattcaggaggagagtggcatacccaaagttgccgacccttggggaggctcgtacatgatggagtgcttgactaatgatgtatacgatgcagcactcaagttaatcaacgagatagaagagatggggggaatggccaaggccgtggcggagggtattcccaagctccgtatcgaggagtgtgctgcccgtcgccaagcccgtatcgatagtggatctgaagttatagtgggcgtcaacaagtatcagttggagaaggaggacgctgtggaagtgctcgcaatagacaacacctctgtgaggaatcgacagatagagaaactcaagaaaatcaaatctagtagagaccaggcgctcgccgagagatgccttgctgctttaacagaatgcgctgctagcggcgacggaaacatcctagcccttgccgttgacgcctcaagggctcgatgcacagtcggcgagattacggacgccctgaaaaaggtattcggcgagcacaaagccaacgaccggatggtttcaggagcctatcgccaggagttcggagaatccaaagaaataacatccgctattaaaagagtgcacaaatttatggaacgggagggtcgaaggccccgacttctcgtcgcgaagatgggccaggacggccatgatcgcggggcgaaggtaattgccaccggcttcgccgatctcggtttcgatgtcgatatcggacctctgttccagactccgcgagaggtagcccagcaggctgtggatgcagacgtgcatgctgtagggattagtactttagccgcaggccacaaaaccctggttcctgaattaatcaaggagctgaactcccttgggaggccggatatattggttatgtgcggcggagttatacctccccaggactacgagttcctgtttgaggttggtgtatctaacgtctttgggcccggaacacggatccccaaagctgcggtacaggtactcgatgacatcgaaaagtgtttagaaaagaaacagcagagtgtg

SEQ ID NO: 110 - DNA, 2250 bp, Artificial Sequence
  Codon optimized sequence that encodes an MCM polypeptide with the WT mutation
atgctgagggccaagaaccaactgtttctgctcagcccgcactaccttaggcaggtgaaggagagttccgggagtagattaatacagcaacgtttgttgcaccagcaacagccccttcacccggagtgggccgccctggcaaagaaacagctgaagggaaagaaccccgaggatctaatttggcacaccccagagggtatctccattaagccgctctacagcaagcgcgacaccatggacctcccagaagagctgcctggtgtcaagccgtttactagagggccataccccactatgtatacattccggccctggactatcagacagtatgccgggttctcaacagtcgaggaatctaacaagttctataaggacaacataaaagcgggccagcagggacttagcgtagccttcgacctcgctacccaccggggctacgacagcgacaatcccagagtaaggggcgatgttgggatggcaggtgtggccatcgatacagtggaagataccaaaatccttttcgacggaattcccctcgaaaaaatgtccgtcagtatgacaatgaatggcgccgtgattcccgtactggctaatttcattgtgaccggagaggagcagggcgttcccaaggagaagttgactggaacaattcagaatgacattctgaaggagtttatggtgcgcaacacctacatttttcctcctgaaccctctatgaagatcatagctgatatttttgagtacaccgcaaagcacatgcctaagttcaatagcattagtatcagcgggtatcatatgcaggaagccggtgctgacgctatcctggaattagcctacacgctcgcagatggcctcgagtactctcgaaccgggctgcaggcaggcctgacaattgatgagtttgcccctcgattatccttcttttggggcattgggatgaatttctatatggagattgccaagatgcgcgcgggccggaggttatgggcccatttgattgaaaagatgttccagcccaagaattccaagtccctgctgctccgggcacattgccaaacgtccggctggagcctgacggagcaagacccctataacaatatcgtgaggacggcgatagaggccatggctgctgttttcggcggtacgcaatccctgcacacgaactcattcgatgaagcccttgggcttcctactgttaaatccgcgagaattgcaagaaatacccagataataattcaggaagagagcggcatccctaaggtagctgatccttggggcgggtcctacatgatggagtgtctgactaatgacgtctacgatgccgcattgaaattaatcaatgagatcgaggagatgggaggaatggccaaagccgtggccgagggcatccccaagctccggattgaggagtgcgcagcccgacgacaggcccgtatcgattcaggttcagaggtgattgtcggagtaaacaagtaccagcttgagaaagaggatgcagtagaagtcctggcaatagacaatacatcagtgcgcaatagacagattgagaaactcaagaaaattaagtcctcaagggatcaggctctggcagagcggtgcctagcagctcttacggaatgtgccgccagcggcgacggaaacatattggcgctagcggtggatgcaagcagggcaagatgtactgtcggcgagatcactgatgccctgaagaaggtgtttggcgagcacaaggctaatgatcgcatggtctctggagcatacaggcaagaattcggtgaatctaaggaaatcacatccgccataaaaagggtgcacaagtttatggagcgggaaggcaggaggccccgtctgctcgtggctaaaatggggcaggacggccatgacaggggcgcaaaggttattgccactggcttcgcagatttaggatttgacgtggacatcggacccttgttccaaaccccacgagaggtggcacaacaagctgtggacgctgatgtacatgccgtgggaatctccacccttgccgctggacacaaaaccctggtgcccgaactgatcaaggaactaaattcccttggccggccagatatcctggtgatgtgcggcggcgtgataccacctcaggattacgagttcctatttgaagttggggtatctaatgtgttcggtcctggcacacgtattccaaaagccgcggtccaggttctggacgatattgaaaaatgtcttgagaaaaaacagcagtcagtg

SEQ ID NO: 111 - DNA, 2250 bp, Artificial Sequence
  Codon optimized sequence that encodes an MCM polypeptide with the I69V mutation
atgcttcgtgctaaaaaccaactgtttttattgtctccccactacctgcgacaggtaaaagagtccagcggatcccgtctaatccagcaacgtttgttgcatcagcaacagcccctgcaccccgaatgggccgcactggcgaaaaagcaactcaagggcaaaaatccagaggacttaatttggcatacccccgaagggatttccgtgaagcccctctattccaaacgggatacaatggatttgcccgaggaactcccaggtgtgaaaccctttacaaggggcccataccccaccatgtatacattccgaccctggactattaggcagtacgcggggttctctacagttgaagaatcaaacaaattctataaggacaatattaaggccggccagcagggcctgagcgttgcttttgacctcgccacccacaggggctatgatagcgacaaccctcgcgtcaggggggatgtgggcatggccggggtggccatagacaccgtggaggacacgaaaattttgttcgatggaatcccactcgagaagatgtccgtgagtatgaccatgaacggcgctgttatccctgtgctggcaaactttatcgttaccggcgaggaacagggagttccaaaggaaaagctcacaggtaccattcaaaatgatatcttgaaggaattcatggtacgaaacacgtatattttccctcccgagccaagtatgaagatcattgccgacatcttcgagtataccgcgaagcatatgccaaaattcaattctatcagtatttctgggtatcacatgcaggaggctggtgcagacgctatcctcgagctcgcctatactctcgcagatggcctggaatacagccgtactggtcttcaagccggcctcacaattgacgaatttgcccctcggctcagttttttctggggtatcggcatgaatttctatatggagatcgccaaaatgagagctggtaggcgcctgtgggctcatctgatcgaaaaaatgtttcaacctaagaactctaagagcctcctcctgcgggcacactgtcaaacatccggttggagcctgacagaacaagatccctacaataacattgtccggactgccatagaagcgatggccgcggtctttggcggcacacagtctcttcatacaaattcctttgatgaggcactgggactgcccacggtgaagagtgcacggattgcgaggaatactcagataattatccaggaagaatccggtataccaaaagtcgccgatccttggggaggttcctatatgatggaatgtctgactaacgacgtctatgacgccgcactaaagctaataaatgagatagaggagatgggcggtatggcaaaagctgtggccgaggggattcctaaacttcggattgaggagtgtgccgcccgcaggcaagcccggatcgactcagggtcggaggtgatcgtgggcgtaaacaagtatcagctcgaaaaggaggacgccgtagaagtcctcgccattgacaatacctcggtgcgcaaccgccagatcgagaagctaaagaagataaagtcgtccagagaccaggcgctggctgagaggtgcctggctgccttaaccgagtgtgcagcgtccggcgacgggaatatcctggccttggcggtggatgcctctagagcgaggtgtaccgtgggcgagattacagacgccctaaaaaaggtgtttggtgagcacaaggccaatgatagaatggtctcaggggcctatcggcaagaattcggtgagtcaaaggagatcacctctgccatcaaaagagtgcacaaattcatggaaagggagggcaggaggcccagattacttgttgccaagatgggccaggacggccatgaccgtggcgctaaggtgattgctacaggctttgcagatttgggattcgacgtagatattggcccgctctttcagacgcctcgtgaggtggcccagcaggcagtagatgccgatgtccatgccgtagggatcagcactcttgcagccggacataagactttggttccagaattgataaaggagctcaactctctgggccgccctgacatcttggttatgtgtggcggggtaatccccccacaggattacgaatttctcttcgaggtaggagtatcaaatgtcttcgggccaggaacccgcatcccaaaagctgccgtgcaggtcctcgacgacatcgaaaaatgcttggagaaaaaacaacagagcgtg

SEQ ID NO: 112 - DNA, 2250 bp, Artificial Sequence
  Codon optimized sequence that encodes an MCM polypeptide with the I69V mutation
atgcttcgggcaaagaatcagttgttcctgttgtctccccactacttgagacaggttaaagaatcctctggctcacgcctcatccagcagaggctgcttcaccaacagcagcctctgcaccctgagtgggcagccctggctaaaaaacagctaaaaggaaagaatcctgaggatctgatctggcacacccctgaggggatttcagttaaaccactgtactccaagagggacacgatggatctgcccgaggaacttccgggggtgaagccgttcacccgcggcccataccctactatgtacacattccggccgtggacaattcggcagtatgcaggattttctacagtagaggaaagcaataagttctacaaagataatattaaggctggtcagcagggtctgtcagttgccttcgacctggcaacccacaggggatacgactccgataatccgcgggttcgtggggatgtcggcatggctggcgtcgccatcgatacagttgaggacaccaaaattctgtttgatggaatcccccttgaaaaaatgtcagtgtccatgaccatgaatggggccgtgattcctgtcctggccaattttatcgtgaccggcgaagagcaaggagtgccaaaggaaaaactgaccggtacgatccagaatgacatattgaaagaattcatggtccgcaacacgtatattttcccacccgaaccttctatgaagatcatcgcggatatctttgagtacacagctaaacacatgccaaagttcaacagtatctcaatcagcggataccacatgcaagaggccggcgctgatgcaattctggagctggcctacactcttgccgacggactggaatacagccggacggggctccaggctggtcttacaatcgatgaattcgcaccccggcttagtttcttttgggggatcggcatgaacttttacatggagattgccaaaatgagggctggtcggcgcctctgggcacatcttattgagaagatgtttcagcccaaaaactctaagagtttactgcttagggcccattgtcaaacaagcgggtggagtctgacagagcaggacccttataataacatcgttaggaccgccattgaagcgatggcggcagtatttggaggcacccagagcctgcacactaacagtttcgatgaagcacttggcctgcctacagtcaagagcgctcgaatcgctcgtaacacccagataatcattcaggaggagagtggcatacccaaagtggccgatccctggggcggatcttacatgatggagtgtttaaccaacgatgtatatgacgccgccttaaaactaattaatgaaattgaagaaatgggaggaatggcaaaggcggtggctgaaggcatccccaagcttcggatcgaggagtgtgccgctagacggcaggcacgtattgactcaggaagtgaagtaattgtgggagtgaacaaatatcagttggaaaaagaagacgccgtggaagtgctcgccattgacaacacctccgtgcggaaccgtcagatcgaaaagctgaagaagattaagtctagccgggaccaggctctcgcagaaaggtgtctggccgcccttaccgaatgcgccgcgagtggcgacggcaacattctggcactggccgtcgacgcatctcgggctcgctgcaccgtaggagaaatcacggacgctctgaagaaggtgttcggagaacacaaggctaacgaccggatggtctccggcgcttataggcaggagtttggggaatccaaagaaattaccagtgccataaaacgggtccacaaattcatggagagggagggccggcggcctcggcttctcgtggccaaaatggggcaggacggacacgatcgaggtgcaaaggtcatagcaactggtttcgccgacctgggattcgatgttgatatcggacctttatttcagactcctcgcgaagtggctcaacaggccgtcgacgctgacgtgcacgccgtggggatctcaactctagcagcaggccataaaactctggttccggaactcattaaagaactcaattcgctggggcggccagacatcctggttatgtgcggaggtgttatccccccccaagattacgagttcctgttcgaggtcggcgtcagcaatgtgttcgggccaggtacgaggatccctaaagccgctgtacaggttctggatgatattgagaaatgtcttgagaaaaaacagcaatccgtc

SEQ ID NO: 113 - DNA, 2250 bp, Artificial Sequence
  Codon optimized sequence that encodes an MCM polypeptide with the I69V mutation
atgctaagggcaaagaatcagctcttcctgctatcacctcactatctcagacaggtgaaagaatcttctgggtccaggctcatacaacagagattgcttcatcaacaacaaccgctgcatcctgagtgggctgctctggctaaaaagcagttgaagggcaaaaaccccgaggacctcatctggcatacaccagaaggcatttcagtcaagcccctctatagtaagagggatactatggatctgcccgaggagctgcccggtgtaaaaccgtttacacggggcccatacccaaccatgtataccttcaggccttggacaatccgtcagtatgctggcttctccacggttgaggaatctaacaagttttacaaggataacatcaaagctggacagcagggtctgagtgtggcattcgacttagcaacacatcggggatacgacagtgacaatccccgggtgagaggcgacgtgggcatggcgggagtggctattgatacagtcgaagatactaaaatcttgtttgatgggattcccctggagaagatgagcgtgtcgatgaccatgaacggggctgttatccctgtgcttgcaaactttatagtaacaggggaggaacagggcgtgcctaaggagaagttgaccggcaccatccagaacgatattcttaaggagttcatggtgaggaatacatatatcttccctccagagccaagtatgaagatcatagccgatatttttgaatataccgccaagcacatgcccaaattcaattctatctcaatttcaggctatcatatgcaggaggccggagcagacgctattctggagcttgcatacacactcgcagatggcctcgaatactcccgaaccggactccaggcaggccttacgatcgacgagttcgctccgcgattatccttcttctgggggatcggcatgaacttttatatggaaattgccaagatgagagccggaaggaggctgtgggcacacctcatagagaaaatgtttcagccgaaaaatagcaagagcttgctgcttagagcacattgccaaacctcaggctggagcctgaccgaacaggacccatataacaatatcgtgcgcaccgccatcgaagcaatggcagctgtgtttggcggcacccaaagccttcataccaattcatttgacgaggctctgggcctgcccaccgtcaagagcgcccgtattgcccgcaacacacagatcattattcaagaggagagtggcatacccaaggtggcggacccctggggcgggtcgtatatgatggagtgcctgaccaacgacgtctatgacgccgcgctgaagcttattaacgagatcgaagagatgggcgggatggccaaagccgtagcagagggcattccaaaacttcgaatcgaggaatgtgcagccaggcgacaggcacgcatcgactccggctcagaggtcatcgtcggcgtcaataaataccaactagaaaaggaagacgcagtggaggtgctggcgattgacaataccagcgtccgcaatagacagatcgagaagctcaagaaaattaaaagttccagggatcaggcgctcgcagagcggtgtcttgctgccctaaccgaatgtgccgcttcgggggatggcaatattctggcattggccgtggacgccagtagagcacggtgtaccgttggagagattacagacgccttaaaaaaggtcttcggcgagcataaagctaacgacaggatggtctccggcgcttaccggcaggaatttggcgagagtaaagagattaccagcgccattaagcgcgtacataagttcatggaaagagaagggcggcggcctcgactcctggtggccaaaatgggacaggacggtcatgaccggggtgctaaagtcattgcaacgggtttcgcagacctcggttttgatgttgacatcgggccgctcttccagacacccagagaagtagctcagcaggcagttgatgcggatgtacatgcggtgggcatcagtacgctggcggcaggccacaagaccctggtgccagaattaatcaaggagctcaatagtctgggtcgcccagacattctggtaatgtgcgggggagtaatcccaccccaagattacgaattcctgttcgaggtcggcgtcagcaacgtctttggtccagggactcgcatccctaaagccgctgtgcaggtgctggatgacatcgaaaaatgcctagagaaaaagcagcaatccgtg

SEQ ID NO: 114 - DNA, 2250 bp, Artificial Sequence
  Codon optimized sequence that encodes an MCM polypeptide with the I69V mutation
atgctgcgcgccaagaatcagttgtttctgctgagcccacactatttgcgtcaagttaaggagtccagcgggtcccggctgatacagcagaggctgctgcaccagcagcagcccttgcacccagaatgggccgctttggccaagaaacagctgaaagggaaaaaccccgaagacctcatttggcataccccagaagggatttctgtcaaaccactctattcaaagagggacaccatggatctgcctgaggagctgcctggcgtgaaacctttcacaagaggcccatacccaaccatgtatacattcaggccatggaccatccgccagtatgctggtttctccaccgtagaagagtccaataagttttataaggataatataaaagcaggacaacagggactgtcagtcgccttcgatctggccacgcatagggggtacgacagtgataacccacgggtgcggggtgacgtcggaatggctggagtggccatcgacaccgttgaggatacaaaaatcctgtttgatggtatccctctcgaaaaaatgagcgtgtcaatgacgatgaatggcgctgtcatcccagttttggccaactttattgtgacgggtgaggagcagggtgtgcccaaggagaaactcaccggcacaatccagaatgatattttgaaggaatttatggtaagaaacacttatatcttcccacccgagccgagcatgaaaattatcgccgacatttttgagtacacagccaagcacatgcctaaattcaatagcatctcgatctctggatatcacatgcaggaagccggcgctgatgccatactcgagctcgcctacacacttgccgacggactcgagtacagccgaactggccttcaggccggtctgactatcgacgaattcgctcctagactgtcgttcttttggggcattgggatgaatttctatatggagatcgccaaaatgcgggccggacgcagactctgggctcatctcattgagaagatgtttcaacccaaaaattcaaaatcccttctcctgagggcccattgccagacaagcggctggtccctcacagagcaggacccttataacaatatcgttagaaccgccattgaagccatggccgctgtgtttggaggcactcaatctttacatacaaattcctttgacgaggctttagggttgcctaccgtcaaatccgccagaattgccaggaacacacagattattatccaagaagagtccggaatccccaaagtggctgacccctggggtggtagttatatgatggaatgtttgactaacgatgtatacgatgccgccctgaaactgatcaatgagatcgaggagatgggcggtatggcaaaggccgtcgccgaaggcattccaaagctgcggatagaggagtgcgctgcccgtagacaggcccgaatagacagcggctctgaggtaatcgtgggggtcaacaagtaccagttggaaaaggaggacgctgtcgaggttctggccattgacaacaccagcgtccggaaccgccagattgagaagctgaagaagattaagagttcccgggaccaggccttagccgagcggtgtttggcagccctcacagaatgtgctgcctcgggcgacggcaatattctggccctcgctgtcgatgcatccagggcacgctgcacagtgggggaaattacagatgcactgaagaaggtattcggcgagcataaggccaatgaccgtatggtcagtggggcctataggcaagaatttggtgagtccaaggagattacatcagccataaagagagttcataagtttatggagagagaggggcggcggccacgtcttctggttgctaaaatggggcaagatggacacgatcgtggggccaaagtgatcgcaaccggcttcgctgacctggggttcgacgtggatatcggccctctgttccagactccccgcgaagtggctcagcaagctgtggatgcagatgttcacgctgttgggatttcaacactggccgccggacacaagacgttggtgcccgagctgattaaagaactgaactcactgggaagacccgacatcctggtgatgtgcgggggggtcatccccccgcaggactatgagttcctgtttgaggttggcgttagcaatgtttttggccctggcactcgtattccaaaagctgctgtgcaggtgcttgacgatatcgagaagtgccttgagaagaaacagcagagtgtg

SEQ ID NO: 115 - DNA, 2250 bp, Artificial Sequence
  Codon optimized sequence that encodes an MCM polypeptide with the I69V mutation
atgctcagggccaagaaccaactgtttcttctgtctcctcactatctgcgccaagtaaaggagtccagcggaagtcgcttgatccagcaacggttattgcatcagcagcagcccttacaccccgaatgggccgccctggccaagaagcaactgaagggcaagaaccctgaagatcttatctggcacacccctgaaggcatttcggttaaacccctgtatagcaaacgggataccatggatttgccagaagaacttcccggcgtgaagcccttcacccgcggcccataccctactatgtatactttccggccatggacaattaggcaatacgcgggcttttccactgtagaggaatctaataagttctacaaggacaatatcaaggctggccagcaaggactcagcgtagcattcgacttggccacgcatagaggctatgacagcgacaatccccgcgtaaggggagacgtggggatggccggagtggccatcgacaccgtggaggatacgaagatcctgtttgacggaatcccattggaaaaaatgagcgtgtctatgaccatgaacggcgccgttatccccgtcctcgcaaattttatcgtgacgggggaggagcagggggtgcccaaagagaagctgaccggaactattcagaacgatattctgaaggagttcatggtcagaaacacttacattttccctcctgagccatcaatgaaaatcatcgccgatatctttgaatacacagcgaaacatatgcctaagttcaatagcatctctattagtggctaccacatgcaggaagctggagccgatgctatcctggaattagcttacacgttggcagatgggctcgaatacagccgcaccggccttcaggctgggctcactatcgatgagtttgcgccacgcctgtcatttttttggggtattgggatgaatttttacatggaaatcgcaaagatgagagccggccggagattgtgggcccatctgattgagaagatgttccaacccaagaattccaagtccttgttattacgcgcacattgtcagaccagtggttggagtctcactgagcaggatccttataataatatcgtgcgcaccgctattgaggctatggcggccgtttttggtgggacccagagtctacacacaaatagctttgacgaggccttaggacttccgaccgtgaagtcagcgcgcatagcccgcaacacgcagatcattattcaagaggaatccgggatccctaaagtcgccgacccctggggcggatcatacatgatggaatgtctgacgaacgatgtgtatgacgccgccctcaagcttatcaacgagatcgaggagatgggtggtatggcaaaagccgtggccgaagggatccctaagctcaggattgaggagtgtgcagccagacgccaggcccgcatcgactcaggtagtgaggtgatcgtcggggtgaacaagtaccagctcgaaaaggaggacgccgttgaggtcctcgctattgacaacacctccgtcaggaataggcaaattgagaaattaaagaagattaagtcctcccgggaccaagccttagccgaaagatgtctggcagctctgaccgagtgcgcggcaagcggcgacggcaacatactggctctggctgtggacgcctccagggcacgttgtaccgttggcgaaatcaccgatgcactgaaaaaagtgtttggggaacataaagccaacgacaggatggtatccggagcttatcgccaggaatttggagagtctaaggagattacgtcggcaatcaagcgagtgcacaagttcatggagcgggagggcaggagaccgaggttattggtggctaagatgggacaggacggccacgatcgcggagctaaagtgatcgctaccggatttgcagacctgggtttcgacgtagatattggtcccctgtttcaaaccccaagggaggtcgctcaacaggccgtcgatgctgatgtgcacgctgtgggcatcagcaccttggctgctggacacaaaactcttgtgcccgaactgatcaaggagcttaattcactgggaaggcccgacatcctggtgatgtgcggaggagtgatcccacctcaggattacgagttcctctttgaggttggggtgtctaatgtgttcggtcccgggacccgtatcccaaaagcggctgtccaggtccttgacgatatcgagaaatgcctagagaagaaacaacagagcgtc

SEQ ID NO: 116 - DNA, 2250 bp, Artificial Sequence
  Codon optimized sequence that encodes an MCM polypeptide with the I69V mutation
atgctacgggccaaaaatcagctgttcctgctcagtccccactatctgcgccaggtgaaggagtctagcggctcaaggctgatacagcaacggctcctgcatcagcaacagcctctgcaccccgaatgggcagcccttgccaaaaaacaactcaagggcaagaatccagaggatttgatttggcacacgcctgaagggatcagcgtaaagccgctttactctaaacgcgacactatggacctgccagaagaactgccgggagtgaagcccttcacgcggggtccataccccaccatgtacacctttcggccatggactattagacagtacgccgggttcagtaccgtggaggagtctaataagttttacaaggataatatcaaggctggacagcagggtttgagcgtggcctttgaccttgcaacccaccgggggtacgacagcgacaacccccgggtgaggggggacgtaggtatggccggggtggcaattgacaccgtagaagatactaagattttgttcgatggaattcctttggagaaaatgagtgtgtctatgaccatgaacggagcagtgatacccgttctagccaattttattgtgaccggggaggagcaaggtgtgcctaaagagaaactgactggcacaattcagaacgatatcctgaaggagttcatggttagaaacacatatatatttcccccagaaccgagtatgaagattatagccgatatcttcgaatatacagcaaaacacatgcctaaatttaatagcatctcaatctccggttatcatatgcaggaagcaggagccgatgcgatactggagttagcttacacgctcgccgacggcttagaatattcaagaactgggttacaggcagggctaacaatcgatgagtttgccccaagactgtccttcttttggggaatcggaatgaacttttacatggaaattgccaaaatgagggccggaagacggctttgggcacatttgatcgagaagatgtttcagcccaagaactccaagagtctcttgctgcgagcgcactgtcaaacttccggttggagcctcaccgagcaagacccgtataacaacatcgtcaggactgcaattgaagccatggctgcagttttcggtgggacacaatctctgcacaccaattcctttgacgaagcactggggcttccgaccgtgaagtcagctcggatcgctagaaatacccagataattatccaggaagaaagtggcatccctaaggtggctgatccttggggcgggagttatatgatggagtgtcttacaaatgatgtctacgacgcggcgcttaagctgatcaacgaaattgaggaaatgggaggaatggcaaaggccgtcgctgaaggcatacccaagttgaggatcgaggaatgtgctgcccgcaggcaagccagaattgacagcgggtcagaggtgatagtcggcgtgaacaagtaccagctcgaaaaagaagatgctgtcgaagttttggcaatagataatacttccgtaaggaaccgccagatagaaaagctcaaaaagattaagagttcaagggaccaggcattagcagagaggtgcctggcagccctgactgagtgtgccgcgtcaggggacgggaatatactggccctggctgttgacgcaagtagagcccgctgtaccgtgggagaaatcacagacgcccttaaaaaggttttcggtgaacacaaggccaacgatcggatggtgtccggcgcctaccggcaggaatttggcgaatctaaggaaatcacctcagccattaagcgcgttcacaagtttatggaaagggaagggcggagaccaaggctgctggtggccaaaatggggcaggacggacacgatagaggcgcaaaagtgattgcaaccggctttgccgatttaggcttcgacgtcgacatcgggccactgtttcaaactccccgagaagtggcccaacaggcagttgatgctgatgttcatgccgttggcatttctaccctggccgcaggacacaaaaccctcgtccccgagttgatcaaagaattaaacagtctggggagacctgatatactggtcatgtgcgggggagtgattcccccccaggactacgaattcttattcgaggtgggtgtgagcaatgtcttcggaccagggacacggatacccaaggccgccgttcaggtgctggacgacatcgagaaatgtttggaaaaaaaacagcagtccgtt

SEQ ID NO: 117 - DNA, 2250 bp, Artificial Sequence
  Codon optimized sequence that encodes an MCM polypeptide with the I69V mutation
atgctgcgcgctaaaaaccagctgttcttgttgtcacctcactacctccgacaggtgaaagaatccagcggttccaggctgatccagcagcgtctgctgcatcaacaacagccccttcaccctgagtgggctgccttagctaagaagcagttaaagggaaaaaacccagaggatctcatctggcacaccccagagggcatctctgtgaagcccttatacagcaagagagataccatggacctacccgaggagcttcccggagttaagccctttactcgaggtccttatcctactatgtacactttcaggccatggacgatcaggcagtacgccggcttttccaccgtggaagagtcaaataaattttacaaggacaacatcaaggctggccaacagggactctcagtagctttcgacctcgccacccaccgcggatatgacagtgacaatccacgcgtgagaggcgacgtcggaatggccggagtcgctatcgacacagtggaggatactaaaatcctctttgacggaatccctctcgaaaaaatgtctgtgtccatgacgatgaatggcgcagtgatcccagtgttggctaatttcatagtgaccggcgaagagcaaggtgtgccaaaagagaagctgaccgggacaattcagaacgatatactcaaggaatttatggttcgtaacacttatatattcccgcccgagccatccatgaagattattgctgacatctttgagtacacagctaagcacatgcctaaatttaacagtatcagtatctctggctatcacatgcaggaggcgggggcagatgcaattcttgaactggcctacaccttagcggatgggttagaatacagcaggaccgggttgcaggccgggcttacaatcgacgagttcgcccctcgcctgagcttcttctggggcattggaatgaacttttatatggagatagctaagatgcgggccgggcgtcgactctgggctcacctcatcgaaaagatgtttcagcccaagaattcaaaaagccttctgctgagagctcactgccagacatccggttggtcccttaccgagcaagacccatacaataacatcgtgcgcaccgcaatcgaagctatggccgccgtttttgggggcacgcagtccttacacacaaattcatttgacgaggcgctcggtctccccacggtgaaatccgcgaggattgcgcggaatactcaaatcattattcaggaggagagtggaatcccgaaggttgcggatccatggggcggttcatatatgatggagtgccttacaaatgatgtgtatgacgcagcacttaaattgattaacgagatcgaggaaatgggcgggatggccaaggctgtggccgaaggcatcccaaaactgcggatcgaggaatgtgctgctagaaggcaggctcggatcgactcaggaagcgaagtcatcgtgggcgtcaacaaataccagctagaaaaagaagacgccgtggaggtgctcgccatcgacaataccagtgtaagaaatcgccagatcgaaaagcttaaaaaaattaagtcctcccgggaccaggcgttggccgaacgctgccttgccgctctgaccgagtgtgccgcatccggcgatggaaacatactcgcactcgcagtcgacgccagccgggctagatgtaccgtaggcgagattacagatgccctgaagaaagtgttcggggagcacaaggccaacgatcggatggtgagcggcgcatatagacaggagttcggggagagcaaggaaatcaccagcgccatcaaaagggtgcacaaattcatggagagagaaggacggcgaccccggttactggtagctaaaatgggtcaggatggccacgaccgaggggccaaggtgatcgccaccggatttgccgacttggggtttgacgtggacattggacccctatttcaaactccgagagaggtcgcacagcaagctgtagatgccgacgtgcatgccgttgggatctctacacttgcggcaggacacaagacgttggttccggagcttattaaggagctgaattcactgggcagaccagatattttggtcatgtgcggtggggtgatacccccccaggactacgagttcttgttcgaggtcggagtgtccaacgtgtttggacctggcacacgcatacccaaggcagctgtgcaggtgctggatgacattgagaagtgcctggagaagaagcagcagtccgtg

SEQ ID NO: 118 - DNA, 2250 bp, Artificial Sequence
  Codon optimized sequence that encodes an MCM polypeptide with the I69V mutation
atgctgcgagccaagaatcagctctttttactttcacctcattatctgcgtcaggttaaggaaagctcaggctctagactgattcagcaaaggttactccaccagcaacaacccctgcatccggagtgggccgcactggctaagaagcagttgaagggcaagaatccggaagacctcatctggcacaccccagaggggatatctgtgaagccgctttattctaaacgggacactatggatctgccagaagagctgcctggcgttaagccattcacccgcggaccctatcccaccatgtacacctttagaccatggacaatccgacagtatgcgggcttcagcacagtggaagagtctaataaattctacaaagataacataaaggccggccagcagggcctctccgtcgcgtttgatttagctacacatagaggctacgattcagacaacccaagagtgcgaggcgacgttggaatggctggggttgctattgatactgtagaggatacaaagattctctttgacggtataccgttggagaaaatgtctgtctccatgactatgaatggggccgtgatcccagtcctggccaacttcatagtgacaggcgaggaacagggcgttccaaaggaaaagctgactggaacaatccaaaacgatattctgaaagagttcatggtccggaacacttatattttcccacccgaaccctcaatgaagatcatcgcagatatattcgaatatactgcaaaacacatgcccaaatttaattccatctctatcagtggataccacatgcaggaggccggcgcggacgctatactggagttagcctacacgctcgccgacggcctggagtatagccggaccggtctccaggctggtctgactattgatgagttcgccccacggctgtcctttttttggggcattgggatgaacttctacatggaaatcgcaaagatgcgagcaggaaggcgtctgtgggcccacttaattgagaagatgttccagcccaagaattcaaagtcacttcttctgcgggcacactgccagacgtccggctggtccctgacagagcaggatccttacaacaatatcgttagaacagctattgaggctatggctgctgtgttcggaggcacccagtctctgcacactaactcctttgatgaggcactgggacttccgactgttaagtccgccagaatagcgaggaatacccagattatcatccaagaagaaagtggtatccctaaagtggcggacccatggggggggtcttacatgatggaatgtttaaccaatgacgtgtatgatgccgccttgaagctaatcaatgagattgaggagatgggaggcatggccaaggctgtggcagaaggaattcccaagctccggatagaggagtgtgccgctagaagacaagcccgaatagatagcgggtctgaagtcattgtaggggtgaacaaataccagttggagaaagaggacgcagtggaggtactcgccatcgataatactagcgtccggaaccgacaaattgaaaagctcaagaagatcaaatctagtagggaccaggccctcgcggaacggtgtctggcagcactgacagagtgcgccgccagtggagacggtaatatcctggctctggcggtcgacgcaagtagggctcggtgcactgtgggcgaaattaccgacgcgcttaaaaaggtgttcggggagcacaaagctaacgatagaatggtgagcggagcatatcgtcaagaattcggcgaatcaaaggaaattacttctgcaattaaaagagtacataagtttatggagagggaaggacgccgccccagactgctggtggccaaaatgggacaagatggacacgatcgaggtgccaaagtcattgccacaggatttgcggacctaggattcgacgtggatattggcccactgttccagacgccgagggaagtggcccaacaggcagtagacgccgatgtacatgccgtgggaataagcaccctggctgctggccataaaactctggtgcctgagctaatcaaagagctgaactctttgggacgaccggatatattagtcatgtgtgggggtgtcattcctccccaggactacgagttcctcttcgaggtaggggtgtctaacgtctttggccccggcactcgtattcctaaggcagccgtacaggtgctcgacgatatcgagaagtgcttggagaagaaacagcagtctgtg

SEQ ID NO: 119 - DNA, 2250 bp, Artificial Sequence
  Codon optimized sequence that encodes an MCM polypeptide with the I69V mutation
atgttgcgggctaagaaccagctgttcctcctcagccctcattacttgcgtcaggtcaaggaatctagcgggtcgcgccttattcagcagagactgcttcaccaacagcagcccttgcatccggaatgggccgccctcgcgaaaaaacaactgaagggcaaaaaccccgaggacttaatctggcacacccctgaaggcatctccgtgaaaccactctattcaaaacgagacacaatggacttgccggaggagctcccgggcgtgaagccattcactaggggaccatatccaacgatgtacacgttcagaccctggacgatccggcagtatgcaggtttctccacagtcgaggagtcaaacaaattttataaggataacataaaggccggtcagcaggggctcagcgtggcttttgacctggctacccataggggatacgactccgataatccacgcgtccgtggcgacgtgggcatggccggagttgccatcgatacagtcgaggacaccaaaatactctttgacggaatcccgctggaaaagatgtccgtttctatgactatgaatggggcggttattccagtgctcgcaaatttcattgtaactggtgaggaacaaggagtgcctaaggagaaactaactggcactatacaaaacgacatcctgaaggagtttatggtgcgaaacacatacatctttcctccagaaccctccatgaagattatcgccgatatttttgagtacactgcgaagcatatgccgaagtttaactccatctccatcagtggttaccacatgcaggaggccggagccgacgctatccttgagctcgcctacacgctggctgacggcctggagtacagccgcactggtctccaggctggattaacgattgacgaatttgctccacggctgtcttttttttgggggatcgggatgaacttctacatggaaatcgctaagatgcgggctgggcgccggctctgggctcatctaatagagaaaatgttccaacctaagaattcgaaatctctccttctccgggcacactgtcagacaagcggatggagcctgaccgaacaggacccttacaacaacatcgtccgtactgcaattgaggctatggccgctgtgttcggtgggactcagtcgttacatacaaattcctttgatgaggccctcggactccccaccgtgaagagcgctcggatcgctcgcaatactcaaattattatacaggaagagagcggtatcccaaaagttgccgatccatggggggggagttatatgatggaatgcttaacaaacgatgtgtacgatgctgctcttaagctgatcaacgaaatcgaggagatgggcgggatggcaaaagcagtagccgagggaattccaaaactacgcattgaggagtgtgccgctcggcggcaagctaggattgactctggttcagaggtgattgtcggagtgaataaataccagctcgagaaagaagatgcggtggaggtgctcgccatcgacaatacaagcgtacggaatagacagatagagaagttgaagaaaattaagtcaagtcgggatcaggcactcgctgagcggtgcctcgctgctctcactgagtgtgctgcctctggagatggaaatatcctggctcttgcagtggacgcctcccgggctaggtgcactgtgggtgaaataactgatgctctaaagaaggtctttggcgagcacaaagctaatgatcgcatggtatcaggcgcctatagacaggaattcggtgagtcaaaggaaataacctccgctataaagagagttcacaaattcatggagcgtgagggacgaaggcctcgactcctcgtggcgaaaatggggcaggatggccacgaccgaggcgccaaggtaattgccactggtttcgcagacctgggcttcgacgtcgacataggtcccctgtttcaaacccctagagaggtcgcccaacaggccgtggacgctgatgtacacgcggtcggaatcagcactttggcagccgggcataagactctcgttccagaacttatcaaagaattgaattcgctgggcaggcccgatattctcgtcatgtgtggtggtgtcattccgccacaggattatgagtttttattcgaagtgggagtctccaacgtgttcgggcctgggacgaggatccccaaggctgccgtacaggtgctggacgacatcgagaagtgtctagagaaaaagcaacagtcagtt

SEQ ID NO: 120 - DNA, 2250 bp, Artificial Sequence
  Codon optimized sequence that encodes an MCM polypeptide with the I69V mutation
atgctgcgtgcgaaaaatcaactgttcctgttgtcccctcactacctccgtcaagtgaaagaaagttctggctctcgactcatccagcaacgattactccaccaacagcagccacttcacccagagtgggccgccctggccaagaaacagctcaaagggaaaaatccggaggatctgatttggcacacgcctgaaggcataagcgtgaaacctctgtactcgaagcgggacaccatggacctgccggaggagctgccaggagtcaagccttttactcgtggcccataccctacgatgtatacatttcgtccctggacaattcgccaatacgccgggttttcaaccgtggaggagagcaataaattctacaaggataatattaaggctggtcagcaggggcttagcgtagcattcgatctggctacacaccggggatatgattccgataaccctagagtgcgaggggacgtcggcatggcaggtgtcgcgattgataccgtggaggatacgaaaatcctgttcgatggcatccctttagagaaaatgtcggtctcaatgaccatgaatggagctgtgattccggtgctcgctaatttcattgttaccggtgaggaacagggggtgcccaaagagaagctcacaggaactattcagaacgacattctgaaggagtttatggttcgcaatacatacattttcccccccgagccaagcatgaagatcatcgccgatatcttcgagtacacggctaagcatatgcctaagtttaactccatatccatatccggctaccatatgcaagaagccggcgctgatgctatcctcgagttggcctacaccctggccgacgggctggagtattccagaacaggcttgcaggcgggtctcacgatcgacgagtttgcgccccgtttaagctttttttggggcatcgggatgaacttctatatggaaatagccaaaatgcgggctggtagacgtctgtgggctcacctgatcgagaaaatgttccagcccaaaaattccaagagtttgttactgcgcgcccattgtcagacaagcggttggtctttaacggaacaagatccatacaacaatattgtgcgcaccgcgatagaagcaatggcagccgtgttcgggggcacacagtctttgcacacaaactcattcgacgaggccctgggcctgcccactgtcaagtccgctcgtattgcacgcaacacccagattataatacaggaagaatctggcatacctaaggtcgctgatccctggggaggctcctatatgatggaatgtctgacaaacgacgtgtatgacgcagccttgaaacttattaatgaaatcgaagagatgggaggtatggctaaggccgtggccgagggaattccaaagctcagaatagaagagtgtgccgccaggcgacaggctaggatagatagcgggagcgaggtcatagtcggggttaacaagtaccagctggaaaaggaggatgccgtggaggtcctggccatcgataatacttcagtaagaaatagacagatagagaagctgaaaaagatcaagagttctcgtgaccaagcactggccgagcgctgcctggctgccctgaccgaatgcgctgcctccggagatggcaatattctggcgcttgccgtggacgcatcaagggcccggtgcacagtaggcgaaattaccgatgcactgaagaaggtatttggggaacacaaagccaatgatcgaatggtctcaggggcttacaggcaagagttcggagagtccaaagagataacatctgccattaagcgtgtccacaagtttatggaacgggaaggcagacgtcctaggttgcttgtggccaagatgggtcaggacggccacgataggggggcaaaagttattgccacgggcttcgccgatctcggcttcgatgtcgacatcggacccttgttccagacccctagggaagtggctcagcaggccgtcgacgcagatgtgcatgccgttggtatttcaaccctggccgccggtcataagaccctagtgccagagctcatcaaagagctcaacagcctgggtaggccggatatcctagtgatgtgtggaggagtgattccccctcaggactacgagtttctgtttgaggtcggggtctctaacgtcttcgggccaggcactaggatcccaaaagcagctgtgcaggttcttgacgacattgaaaagtgcctagaaaaaaagcagcagagtgtc

SEQ ID NO: 121 - DNA, 2250 bp, Artificial Sequence
  Codon optimized sequence that encodes an MCM polypeptide with the A499T mutation
atgctgagagcgaagaaccaactgtttctgctcagcccccactacctgcgacaggtgaaggagtcttccggttcaagactgattcagcagcgcctcctgcatcaacaacaacctctgcatcctgaatgggctgcgttagccaagaagcaattgaaaggcaagaatccagaggaccttatttggcacactcctgagggaatttccattaaaccgttgtactctaagagggacaccatggacttacctgaggaactgcctggcgttaagccctttacccgcggaccctatccgacaatgtatacctttcggccttggactattcgccagtatgccggattcagcaccgttgaggaaagcaacaagttctacaaagataacattaaggcaggccaacaggggctttctgtggcttttgacctcgccacccaccgaggttatgactcagacaacccaagagtgaggggtgatgttgggatggccggagtggctatcgataccgtagaagacacaaaaatattgttcgacggaatcccgctagagaagatgtctgtctctatgactatgaatggggctgtcatacctgttctggctaattttatagttacaggcgaagagcaaggagtacctaaggagaagctcacaggcactatccagaacgatatccttaaggagtttatggtccgcaacacatatattttccccccagaaccttcaatgaagataattgcggacattttcgagtacactgccaaacatatgccaaaattcaactccatctcaatctctgggtatcacatgcaagaagctggcgccgacgccatcctggagctcgcttatacactggccgacggactcgaatactcccgcaccggactgcaggctggccttactatcgacgaattcgctccaaggctgtcatttttttggggcatcggcatgaatttttatatggaaatcgctaaaatgagagccgggagacgtctctgggcacacttaatcgagaagatgttccaaccaaaaaattcaaagagcttgctcttaagagcgcattgtcagaccagcggatggagtttgacagagcaggacccctataacaatatcgtccgaaccgccattgaagccatggctgcagtcttcggtggcacgcagtcattgcataccaactcattcgacgaggccctaggtcttcctacagtgaaaagcgcccggatcgctcgaaacactcagattatcatccaggaggaaagcggcattcctaaagtggccgacccgtggggcggcagctacatgatggagtgcctgacaaacgatgtgtacgatgctgcacttaagttgatcaacgaaattgaagagatggggggtatggccaaggcagtggcagagggtatcccaaagctccggatcgaagaatgcgccgccaggagacaggctcgtatcgatagcgggagtgaggttatcgttggcgtgaacaaataccaactggaaaaggaggataccgtggaggtgttggccattgacaacacctcggtgagaaacagacaaatcgagaagctcaaaaaaatcaaatctagcagagatcaggctctggccgagcggtgtctcgctgccctgactgagtgtgcggcaagcggcgatggtaacatcctcgccttggcggtcgacgcctcccgcgccagatgcacggtgggcgagattaccgacgctctgaagaaggtcttcggcgagcataaggcaaacgaccggatggtcagcggagcgtacagacaagagttcggggagtctaaagagattacttcagcgatcaagcgcgtacacaaatttatggagagggagggccgccgtcccaggcttttagtggctaagatggggcaagatggtcacgacaggggggctaaggtcattgcgactgggtttgccgacctaggctttgatgtggacataggccccctgttccaaactcccagagaggtggcccaacaggcggtagatgcggacgtacacgctgtaggcattagcacactggcagcaggtcacaagacgcttgttcccgagctgattaaggaattgaattctttaggaagacctgatatactcgttatgtgcgggggcgtgattccgccccaggactatgagttcctcttcgaggtgggggtgtctaacgtctttggacccggcacacggatcccaaaagccgcggtgcaagtgttagacgacattgaaaagtgtctggagaaaaagcagcaatccgtg

SEQ ID NO: 122 - DNA, 2250 bp, Artificial Sequence
  Codon optimized sequence that encodes an MCM polypeptide with the A499T mutation
atgctgcgtgctaaaaatcaactgttcctgctgagcccacactacctaagacaggtgaaggagtccagcgggtcaagactgattcagcagcgccttttacaccagcaacagcctctgcaccccgagtgggctgccctcgccaaaaaacagttgaagggcaaaaacccagaagatctaatttggcatacccccgaaggcattagcatcaaaccactgtacagcaaacgggatacgatggatttgccagaggagctgccgggggtgaagcccttcacacgcgggccttacccaaccatgtacacattcagaccctggaccatccggcagtatgcaggcttcagcaccgttgaggagagcaataagttctacaaggataatatcaaggcaggtcagcagggactgtctgtggcctttgacctggccactcatcgtgggtatgactccgataatccacgggtacgtggtgacgttggcatggccggtgtcgcaatcgataccgtggaagatactaagatcctgttcgatggtatacccctcgaaaaaatgagcgtgtcaatgaccatgaatggggccgtcattccagtgctggcaaactttattgttacaggagaagaacagggagtgcccaaggaaaaactcaccggcactatccaaaacgatatcctcaaggagtttatggtgagaaatacttatatttttccacccgaaccaagcatgaaaattattgccgatatcttcgagtataccgccaagcatatgccgaaattcaactcgatctcaataagcggctaccacatgcaggaggctggagcagatgctatactcgaactcgcgtatactcttgcggatggcctagagtacagtcggaccggtctgcaggccggattgactatagacgagtttgcgcctcgtttgagcttcttttgggggattggcatgaacttctatatggagatcgcaaagatgcgtgccggccgccggctgtgggcccatctgattgagaagatgtttcaaccgaaaaacagcaaaagcctcttattaagggcccactgccaaacctctggctggtccctgacagaacaggacccatacaataacatcgtcaggactgctattgaggctatggctgcagtgttcggtggaacgcaatccctgcatactaactccttcgacgaggctctcggccttccaacagtcaagagcgctaggatagctcgaaatactcagattataattcaggaagaaagtggtatcccgaaggtggcagacccatggggaggatcctacatgatggaatgtttaactaacgatgtctacgacgcagctctgaaattgatcaatgagattgaggagatgggggggatggcgaaggctgtggcggagggaatccccaaactcaggattgaagaatgtgcggctcgaagacaagctcggatcgacagcggaagcgaggtgattgtgggtgtaaacaagtatcagctagaaaaggaagacacagtcgaggtactggccatagataatacctcggttcgcaaccggcagattgaaaagctgaaaaaaatcaaatcctcaagggatcaggcattggcggaaaggtgtctggctgcccttaccgagtgtgccgcatcaggagatggcaatatcctggccttggcagttgatgccagtcgagctaggtgcacggttggggagatcaccgacgcgctgaaaaaagtctttggagaacataaggccaatgatcggatggtgtccggagcctacagacaggagttcggggaatctaaggagattacaagcgctatcaaacgggttcacaagttcatggagcgagagggacgtaggccacgtcttctcgtggccaaaatgggccaggacggccatgatcgcggggcaaaggtgattgctacaggtttcgctgacctcggctttgatgtagatattggaccgcttttccaaacacctcgagaggtcgcccagcaggccgtagacgctgacgttcatgctgttggcatcagtacacttgcagctggtcataaaactttggtgccagagctgatcaaagaactgaattccctaggccgccctgacatcttagtcatgtgtggaggagtgattcctccacaggactatgagttcctctttgaggtgggagtatccaacgtctttggacccggcacaagaatccccaaagcggccgtgcaagtgctcgatgatattgagaaatgcctggagaagaagcagcaatctgtt

SEQ ID NO: 123 - DNA, 2250 bp, Artificial Sequence
  Codon optimized sequence that encodes an MCM polypeptide with the A499T mutation
atgctgcgcgcaaagaaccaactcttcttgctgagccctcactacctgaggcaggtgaaagaaagctcaggatcgcggctgatccagcagcggctcctgcaccagcaacaacccctgcatccagaatgggctgcacttgccaaaaagcaactcaagggaaagaatccagaggacttgatttggcacaccccagaaggaatttcaatcaagcccctgtattctaaacgggacaccatggatcttccagaggaactgcctggggtcaaaccctttaccagagggccctatccaaccatgtatacattccgcccatggacaatcagacagtatgcaggattcagtaccgtggaagaaagtaacaagttctataaggataacattaaggcaggccagcagggattaagtgttgcttttgatctcgctacccaccgagggtacgattctgacaatccgcgagtccgtggtgacgtcggcatggccggtgttgcaattgatactgttgaggacacgaaaattctgtttgacggaatccctctcgaaaagatgagcgtttctatgactatgaatggcgctgttatccctgttctggctaacttcatcgtgacgggagaggagcagggcgtccccaaggagaaactgacaggcacaattcagaacgatatactgaaagaattcatggtgcgtaacacctatattttcccaccggagccttccatgaaaatcatcgctgacatctttgaatatacagccaagcatatgccgaagttcaactcaatttccatctcaggctaccatatgcaggaggcaggcgcagacgcaatattggagttggcctataccctggcagatgggttagaatattcccgaacgggactgcaagctggactgaccatcgatgagtttgcccctcgcctttcctttttctggggaataggaatgaacttctacatggagattgcgaaaatgcgcgccggtcgccgattgtgggctcacctgatcgagaagatgtttcagcctaaaaatagcaaatctttgctcctgagagcccactgccagacctctgggtggtctctgaccgaacaggacccctataataacatagtgcgtacggctattgaagctatggctgcagtcttcggcgggacacagtctctgcataccaactctttcgacgaggcgctcggactgcccaccgtgaagagcgccagaatcgccagaaatacccaaatcataatccaggaagaatctggaattccaaaagtggcagacccgtggggcggttcctacatgatggagtgtttgacaaatgatgtgtacgacgcagccctgaagttgatcaatgaaattgaggaaatgggcgggatggccaaggcggtcgctgaaggaatccctaagctgcgtatcgaggaatgcgccgcccgacgacaggcgcgcattgacagcggctctgaggtaatcgtgggtgtcaacaagtaccagctggagaaggaagatactgtcgaggtcctggccattgacaatacctcggttagaaacaggcaaatcgagaagctgaaaaaaatcaagagtagccgtgaccaggctttggctgaaaggtgcctggctgctttgaccgagtgcgctgccagcggcgatggcaatatactcgccctagctgtggacgcatcacgggctcgatgtacagtgggcgagattacggatgcactgaaaaaggtgtttggtgagcacaaggctaatgaccgcatggtgtccggcgcctaccgacaggagtttggagagtccaaagaaatcaccagcgccatcaagagggttcacaagttcatggagcgggagggcagacggccccggcttcttgtggccaagatgggccaggatggacacgatcggggagctaaagtcatcgctacgggtttcgcagatttagggtttgatgtggacatcggcccactgttccaaactcccagagaggtggcccagcaagcggtagatgctgacgtgcacgcagtgggtatttctaccctggccgccggacacaaaactctggtgcccgaattgataaaagagcttaattctcttggacgacctgatatccttgttatgtgcggtggtgtgatcccccctcaagactacgagttcttgttcgaggtcggagttagcaatgtcttcgggccgggcacacggatacccaaagctgcagtgcaagtactagatgatattgaaaaatgcctggaaaaaaagcaacagagtgtg

SEQ ID NO: 124 - DNA, 2250 bp, Artificial Sequence
  Codon optimized sequence that encodes an MCM polypeptide with the A499T mutation
atgctgagggccaaaaatcagttgttcttgctgagtccccattaccttcgtcaggtcaaggaaagcagtgggtctcgtctgatccagcaaaggctgctgcatcaacagcagcctctgcaccctgagtgggcagcactcgctaagaagcagctgaaaggcaaaaatccggaagacctaatctggcatactcccgaaggcatatctatcaaacctttgtatagtaagcgtgacacaatggatctgcctgaagagctgccgggagtcaagccttttactaggggcccttaccctacaatgtacactttcaggccctggacaataaggcaatacgctggctttagtacagtcgaggagagcaataaattttataaagataacatcaaggctggacagcaaggcctgtctgtggcctttgacttagctactcatagaggttatgacagcgataatccgcgggtgcgtggcgacgtgggaatggccggagtggccatcgacaccgtagaagacactaagattctgttcgatggaatccctctggaaaagatgtccgtctcgatgaccatgaatggggccgtcatccccgtactagcaaacttcatcgtcactggtgaggaacaaggcgtcccgaaggaaaaactgacaggcacaatccagaacgacatcctcaaagaatttatggtccgaaatacctatattttccctcccgaacccagtatgaagattattgccgatatattcgaatataccgccaagcacatgcccaaattcaattccatttccatttcggggtaccatatgcaggaagctggcgcggatgccatccttgaattggcctacactctcgctgatgggctcgaatattctagaaccgggctgcaggccggattgacaatcgatgagtttgccccacgcctgtctttcttctggggtattggtatgaacttttatatggagatcgctaaaatgcgggccggcaggcggctctgggcgcacctgatcgagaagatgtttcagccgaagaattctaagagcctgctgctgagggctcactgtcagacatcaggttggtccctgacggagcaggacccatacaataatattgttcgaacagccattgaggccatggcagctgtgtttggcgggacgcagtccctacatactaattcgttcgacgaagcgttaggtctccctacagtcaagtctgccagaatagcccgcaatacccaaatcattatccaggaagagagcggcatcccaaaggtagcggacccctggggaggaagctacatgatggaatgcctgaccaacgacgtgtatgacgctgctctgaagctgattaatgagattgaagaaatggggggcatggcaaaagccgtcgccgagggtatccctaagcttagaatagaggagtgtgctgcacgccgccaagcacggatagattcaggatcagaggtcatagtcggcgttaacaaataccagttagagaaggaggacacagtggaagtgctagcgattgataatacttccgtgagaaacagacagattgagaaactgaaaaaaattaagtctagccgggatcaggccctggctgaaaggtgtctggcggctctaactgagtgcgcggccagtggagacgggaatattcttgctttagctgtcgacgcttcgcgggctaggtgcacagtgggtgaaattaccgatgcattaaaaaaagtgtttggggaacataaggcgaacgaccgcatggtgagcggtgcttaccgtcaggagtttggggagtcaaaggagatcacatccgctatcaagagggtgcataagttcatggagcgggaggggcggaggccaagactgttagtagcaaaaatggggcaggacggtcatgataggggtgctaaggttattgcgaccgggttcgcagacctgggtttcgacgttgatatcggacctttattccagacccctagagaggtggcccagcaagctgttgatgctgacgtgcatgctgtgggcatctcaactctcgccgcgggccacaagacactggttcccgagctgatcaaagagttgaactcactggggcggcctgacattctggtcatgtgtggaggagtgatcccgccccaggattacgaatttctgttcgaggtgggtgttagtaacgtgtttggacctggaaccaggattcccaaggcggccgtccaggtcctggacgacatcgagaagtgcttggagaagaagcagcaatccgtg

SEQ ID NO: 125 - DNA, 2250 bp, Artificial Sequence
  Codon optimized sequence that encodes an MCM polypeptide with the A499T mutation
atgctgagggccaagaaccagcttttcctcctgtcacctcactacttaagacaagtgaaagaatcctcaggttctaggctgattcagcagcgcttgctgcatcagcaacagcctctccaccctgagtgggctgctctggctaaaaaacaattgaaaggtaagaaccccgaagatctcatctggcatactcctgaaggaattagcataaagccgctgtactccaagcgagacacaatggatctgcccgaggagttgcctggagttaagccatttaccaggggtccgtatccgaccatgtacaccttcagaccctggacaatcaggcagtacgctgggttctctaccgtcgaggagtccaataaattttacaaagacaacatcaaagctggccaacagggactgtctgtagccttcgatctggccacccataggggctacgattccgataatcccagggtcaggggggacgtgggcatggccggcgtggccatcgacaccgtagaagataccaagatcctctttgatggaattcccctcgagaagatgtcagtgagcatgacaatgaacggggctgtaatccctgtcctcgcaaactttatcgtgacgggagaggagcagggcgtgcccaaggaaaaattgacaggaaccatacagaatgatatcttgaaggaattcatggtgcggaatacctacatatttcctccagaaccgtcaatgaaaattatagccgatatcttcgagtacactgccaagcacatgcctaaattcaattccatcagcatcagcgggtaccatatgcaggaagccggggccgatgctatcctggaactggcctacactctggccgacggactggagtatagtcggaccggattgcaagccggactgactattgatgaattcgcccctagattatcctttttctggggaattggaatgaacttttatatggaaattgctaagatgcgcgcagggaggcggctgtgggcccacttaattgagaaaatgttccagcccaagaatagtaaatcgcttctccttcgagcccactgccagaccagcggttggtcactgactgagcaggacccttataacaatattgttaggacagcaatagaagcgatggctgcagtgtttggaggcactcaatcattacataccaattccttcgacgaagcactggggctgccaaccgttaagagcgctagaatcgcacgcaacacgcagatcatcattcaggaagagtcaggaattcctaaggtggctgatccttggggcggaagttacatgatggagtgtctcacaaatgatgtgtatgatgcagctttaaagcttataaacgagattgaggaaatgggcggcatggccaaagcagtggcagagggtatcccaaagctccgcatcgaggaatgtgctgcacgccggcaggctcgcattgattcaggctccgaagtgattgtgggagtgaacaagtatcagctcgaaaaagaggatacagtggaggtgctggccattgataacaccagcgtccggaatagacaaatcgagaaactgaaaaaaatcaagtctagcagggatcaggcactcgccgaaagatgtttagccgccctgaccgaatgtgccgctagcggtgacggcaacattttggccttggccgtggacgcctcacgcgcaaggtgtacggttggtgaaatcaccgacgctctcaaaaaagtcttcggagaacacaaagctaatgaccggatggtgtctggcgcctaccggcaggagttcggcgaatccaaggaaataaccagtgctataaaacgggtgcacaagtttatggagagggaaggtaggaggcctcgcttactggtcgctaagatgggacaagacggacacgaccgcggcgccaaagtcatcgccacaggattcgcagatcttggctttgacgtcgacataggaccgctgtttcaaactccaagggaggttgctcagcaagcggtagatgcagatgtgcacgctgtcggcatatccaccttagctgcaggtcacaaaaccctggtgccggagttgataaaggagctcaattccttagggaggcccgatatattggtcatgtgcggtggcgtgataccaccccaggactacgagttcctcttcgaggtgggtgtcagtaacgtcttcggtcccggcacaagaatcccaaaggctgctgtacaggttctagacgatattgagaaatgcctggagaaaaagcagcaatccgtg

SEQ ID NO: 126 - DNA, 2250 bp, Artificial Sequence
  Codon optimized sequence that encodes an MCM polypeptide with the A499T mutation
atgcttcgcgccaaaaatcagctgtttttactgagtccgcactatcttaggcaagtcaaagaaagctccggctcacgactgattcagcagcggctcttacatcagcaacaacctctgcatcctgaatgggctgccctcgccaagaagcaacttaaaggaaagaatcccgaggacctcatctggcacactccagagggcatctctattaaacccctgtactccaagcgtgacacgatggatctcccagaggagctgcctggagttaagccgttcacccgtggcccctacccaaccatgtacacctttaggccttggaccattagacagtacgccggttttagcacagttgaagagagcaacaagttctataaggacaacatcaaagctgggcaacagggactgtctgtggccttcgatctggccactcaccgaggttacgatagcgacaatcctcgggtgaggggagatgtgggaatggctggggtggcaattgacactgttgaggatacaaagatcctattcgacggtataccactggaaaagatgtcggtttctatgacgatgaatggagcagtaattcctgtgttggccaactttatcgttacgggggaggaacagggcgttccgaaggaaaagctaacaggtaccatccagaacgatattcttaaggagttcatggtgcgcaacacttacatatttccacctgagccatccatgaagattatagctgatatattcgaatacaccgccaagcatatgcctaaattcaattccatctcaatcagtgggtatcatatgcaggaggccggcgcggacgcaattcttgagctcgcctatacattggcggacggtttagaatatagccggaccggcttacaggccggcctgaccattgatgaattcgcccctcggttgtctttcttctggggaatcggtatgaacttttatatggagatcgcaaaaatgagagcgggccggcgtctgtgggcacatttgatagaaaaaatgtttcaaccaaaaaacagcaaaagcctgcttctgcgagcccactgtcagacaagcggttggtctctcactgagcaggacccatacaataatatagtgcgaacagctatcgaggccatggccgccgtgtttggtggcacacaatctctgcataccaacagttttgacgaggccctgggtctgccaactgtgaaaagcgccaggatagcccgcaatacccagatcataatccaagaagaatctggcattcctaaagtggcagatccttggggaggaagttatatgatggaatgtctgacaaacgatgtctatgacgccgctttgaagctaatcaatgagatagaggaaatgggcgggatggcaaaagccgtcgcagagggcatccccaagctgcggatcgaagaatgtgctgctcgacgtcaggctcgaattgactcaggatccgaggtaatcgtgggcgtaaacaaataccagcttgagaaagaggacaccgtcgaagtgctggccatcgataacaccagcgtcaggaaccgtcagattgagaagctaaagaagataaagagtagtcgcgatcaggccctggccgagaggtgcctggcagcccttactgagtgtgccgcaagtggggacggcaacatcttagcactcgccgtcgatgctagcagggccagatgtaccgtcggggaaattaccgatgccctcaagaaagtgttcggagaacacaaagccaacgatcggatggtcagcggggcataccgccaggagttcggcgagagtaaagaaatcacctctgccatcaaaagggtccataagttcatggagagggagggaaggcgcccccgtttgttagtagccaagatgggccaagatggccacgaccgaggagccaaggtgattgcaaccgggttcgcagatcttggcttcgacgtcgatatcggccccctatttcagacccctagggaggtggcacaacaagcagtggacgcagacgtgcatgctgtggggatctcaaccctggcagccggacataagaccttggtgccggaactgataaaggagctgaattctttgggcaggccagacatcctggtgatgtgtggcggagtaatacccccgcaggattacgagttcctgttcgaggtgggcgtctccaatgtgttcgggccaggtacgcgcattcccaaagccgctgtgcaggtgctcgacgatatagagaagtgtctggaaaaaaagcagcaatccgtc

SEQ ID NO: 127 - DNA, 2250 bp, Artificial Sequence
  Codon optimized sequence that encodes an MCM polypeptide with the A499T mutation
atgctccgcgcaaagaatcaactgttcctgctctcgccacactacttacgccaggtcaaggagagctccgggtcccggcttatccaacagcgtctgctgcatcagcagcagcccctacaccccgaatgggcagctctggcaaagaagcaacttaaagggaagaacccggaagacctaatctggcacaccccagaaggtattagcatcaagccattgtactccaaaagagacactatggatctcccagaggagctgcccggggttaagccattcactagaggaccttatccaacaatgtacacctttaggccctggaccattagacagtatgctggtttttcaacagtcgaggagtctaacaaattttacaaggataatattaaagccgggcagcaggggctatccgttgcctttgatcttgccacccatcgcgggtacgacagtgataatccccgcgtgcgtggagacgtgggtatggccggggttgcgattgatacggttgaagataccaaaatccttttcgacgggattcctcttgaaaaaatgtctgtctcaatgactatgaatggcgcagtgatccctgtactggcaaatttcatagtgaccggggaggaacagggtgtgcccaaagaaaagttaacgggcacgatacagaatgacattctaaaagaattcatggtccggaatacgtatatcttccccccagaaccttccatgaaaattatcgcagatatctttgaatacaccgccaagcatatgcccaaattcaattccatctccatctcgggctatcacatgcaagaggcaggggccgatgctatccttgaactcgcttataccttggcggacgggctggaatacagtcggaccggattacaggccggactgacaatagacgaattcgctcccaggctttcattcttctggggcattgggatgaacttttacatggaaatcgcaaagatgcgagcaggccgacgcctctgggctcatctgattgaaaagatgttccagcccaaaaacagcaaatccctcttactgagagcacactgtcagaccagcgggtggtcgctgactgagcaagatccgtacaataacatagttcgtacagccatcgaggccatggctgcagtgtttggtggcacccagtctttgcacactaattcgtttgatgaggccctaggactgcccacagtaaaatccgctaggatcgcacggaatacccagattatcattcaggaagagagtggcatcccaaaagtggccgatccatggggtggctcctacatgatggaatgcttgaccaatgatgtgtatgatgccgccctgaaactaataaacgaaattgaggagatgggtgggatggctaaggcagtggccgaaggtatcccgaaactcagaatagaggagtgcgctgccaggagacaggcacggattgatagtggtagcgaggttatcgtgggcgtgaataaataccagctggagaaagaggataccgtggaagtcttggcaatcgacaacacatcggtgcggaatcgccagatcgagaagctgaaaaaaatcaaatcctctcgcgaccaggcattggccgagcgatgtctcgccgctttaacggaatgcgcagcaagtggagatggtaatatactggctctggctgttgatgcatctagagcccgctgtactgtgggggagatcacggatgcgcttaaaaaagttttcggcgagcacaaagctaatgaccgcatggtgagtggtgcataccgccaagaatttggagagtcaaaagagatcacttcggccattaaacgtgttcataagttcatggaacgcgaaggcaggagaccgcgactgctcgtggcgaagatgggccaggatggccatgaccggggagcaaaagttatagcaacaggatttgctgacctcggattcgacgtggacataggccctctctttcagacgcctagggaagtcgctcagcaggccgtggacgcagacgtgcacgcagtgggcatttccacgttggcggcaggacacaaaaccttggtccctgagctcatcaaggagctgaattcgctggggcgcccggacattctagttatgtgtggtggcgttatccctccccaggactacgagttcctcttcgaagtgggagtatctaacgtgttcggtcccggcacccggatacctaaggcagccgtgcaggtactggatgacatagagaagtgtctggaaaaaaagcagcagtccgtg

SEQ ID NO: 128 - DNA, 2250 bp, Artificial Sequence
  Codon optimized sequence that encodes an MCM polypeptide with the A499T mutation
atgctacgcgcaaaaaatcagctgttcctgttaagtcctcattacttaaggcaggtgaaggaaagtagcggctcgcgcttaatccagcaaaggctcctgcaccagcagcagccgctgcatcctgaatgggccgctctagctaaaaaacagctgaagggaaagaaccctgaagatctgatttggcacaccccagagggaattagcatcaagccactgtacagtaagcgtgatactatggaccttcctgaagaacttcccggcgtgaagccctttactaggggaccttaccctaccatgtataccttcaggccctggaccattaggcagtatgcaggcttcagcaccgtcgaagaatcaaataagttctacaaggacaacataaaggcgggccaacagggtctgagcgtggccttcgatctggcaacccatagaggctacgacagcgacaaccctcgagtgcggggagacgtcggcatggcgggagtcgccatcgatacagtggaagatacgaaaattttgtttgacggcattcccctcgaaaagatgagcgtgtcaatgaccatgaatggcgccgtcattccagtactggccaattttattgttaccggggaagagcaaggcgtcccaaaggagaaattaacggggaccatccagaacgacatcctgaaggagttcatggtcagaaacacgtatatattccctcctgagccaagtatgaagatcattgcagatatcttcgagtacactgcgaagcatatgccaaagttcaactcaatctccatatcaggctatcacatgcaggaagcaggagcagacgcaatcttggagctggcctacaccctggctgacgggctggagtactcccgaactggattgcaagccggcctgaccatagacgagttcgcaccccgtttgtcctttttttggggcatcgggatgaatttctacatggagattgctaagatgcgcgcaggcaggcgcttgtgggctcatctaatagaaaaaatgtttcaacctaagaacagtaaatcactcctgctgcgtgcgcactgccagacaagcggctggagtcttacagagcaagacccatataacaatatcgttagaacagcaattgaggcaatggccgctgtgtttggcgggacacagtccctacacacaaacagctttgatgaggcactcggcttacccacagtgaagtccgcccgcatagctaggaacacacagatcatcattcaggaagagtccggcatccccaaagttgccgacccttggggcggctcctatatgatggaatgtctcactaacgacgtgtatgacgctgctctgaaattgatcaatgagatcgaggaaatgggtggcatggccaaagcagtcgccgaaggcatcccgaagcttcgaatcgaagagtgtgctgcacggaggcaggccagaatcgacagtggttccgaagtgatcgtaggagtgaacaaatatcagcttgagaaagaagataccgtggaagtgctggccattgacaatacctctgttaggaaccgccagatagagaagctcaaaaagattaagtcttcgcgggatcaggcgcttgcggagaggtgtttagcagccctgaccgagtgtgcggctagtggggacggcaacatccttgcgctggcagtggatgcgagcagagcaagatgtactgtaggcgaaatcaccgacgccctcaagaaggtgttcggcgagcacaaggccaatgaccgaatggtgtctggcgcatatagacaagagtttggtgagagcaaggagatcacatccgcaattaagagagtgcacaagttcatggagcgcgagggaaggcgcccaagattactggttgcaaaaatggggcaggacgggcacgaccggggcgccaaggtgatcgctactggcttcgcagacctgggctttgacgtcgatatcggacctctgttccagacaccaagagaagtagctcagcaggccgtggacgccgatgtgcatgcagtcggtattagtactctggccgccgggcacaagacactggtgccagagctgatcaaggagcttaactcactggggcggcctgatatattggtcatgtgtggcggggtgatcccacctcaagattacgagttcctgttcgaggtgggagtttctaacgtctttggacctggtacccgcatcccgaaagccgcggtgcaggtgctggatgacattgagaagtgcctcgaaaagaagcagcagagtgtg

SEQ ID NO: 129 - DNA, 2250 bp, Artificial Sequence
  Codon optimized sequence that encodes an MCM polypeptide with the A499T mutation
atgctgagggccaagaatcagctgttccttctgagccctcattatctgcggcaggtcaaggagagctcgggatctcgactgattcagcaacgcctcctgcaccaacagcagcctctacacccagaatgggccgccttggcgaagaaacaactaaagggaaaaaatcccgaagacctcatctggcacaccccggaagggattagcattaaaccactctacagtaagcgtgacacgatggacctgcccgaggagctgccaggggtgaaacccttcaccaggggcccttatcccacaatgtatacgtttaggccctggacaatccggcagtacgctgggttcagtactgttgaagaatctaacaagttctataaggacaacataaaggcagggcagcaggggttgagtgtggcatttgacctagctactcatagggggtatgactctgacaatcccagagtaaggggcgatgtagggatggcgggggtcgccattgatactgtcgaggacaccaagatactgtttgatggaatcccgctcgaaaagatgagcgtgtccatgactatgaacggcgcggtgatcccagtgctggccaacttcatcgtcaccggagaggaacagggagtgcctaaggaaaagttaactggtacgatccagaacgacattttaaaggaattcatggtcaggaatacctatatattcccacctgaacctagcatgaagatcattgcagacatattcgagtacaccgctaagcatatgcctaagttcaatagcataagtatcagcggataccacatgcaggaggcaggggcagacgccatcttggaactggcctacacactggccgacggactcgagtattcgagaacgggtctgcaggccggtctgaccatcgatgagtttgcgccaagactgagctttttttggggaattggcatgaacttttatatggagattgcgaaaatgcgggccggcaggcgcctctgggcgcacttgatcgagaagatgtttcagcccaagaattcaaagagtctgctcctgagggcccactgtcagacctcgggatggtctctcacggagcaggacccatacaataacatcgtcagaaccgccattgaagcaatggccgctgtgttcgggggaacgcagagtcttcatacgaactccttcgatgaggcacttggacttcctacagtcaagtcggccagaattgccagaaacacccaaattatcatccaggaggaaagcggaattccgaaagttgcggacccatggggaggctcctatatgatggagtgcctgaccaatgatgtctacgacgccgccctgaagctgatcaatgagattgaagagatgggcgggatggccaaagccgtggccgagggtatccctaaactcaggatcgaggagtgcgctgccaggagacaggcgcggattgattctggttcggaagttatcgttggcgtgaataagtaccagctggagaaagaggacacggtggaagtgctggctatagataacacaagcgtgcgtaacaggcagatcgaaaagttaaaaaagattaagtcctctagggaccaagcgttagctgagaggtgcctcgctgctctgactgagtgcgccgccagtggcgatggaaatatcctcgccctcgccgtagacgcttctagagcacggtgtaccgtcggggaaatcaccgacgcacttaaaaaggtgttcggagaacataaagccaacgatcgaatggtgtccggcgcctacaggcaggaatttggggagagcaaggaaattactagcgcgattaaacgagtccataaattcatggagcgggagggacgacgaccacgactgcttgtagcgaagatggggcaagacggacacgacagaggcgctaaggtaattgctacgggatttgctgatcttggctttgacgtggatatcggcccactgtttcagacaccacgggaagttgcccaacaggctgtagatgccgatgttcacgccgtcgggattagcaccttggcggcaggtcacaagacgcttgttcctgagctgatcaaagagctgaattccttggggaggccagacattctcgtcatgtgcggcggcgtcattccgccccaggattatgaatttctttttgaggtgggagtttccaatgtgtttggcccaggaacccggattcctaaggcggccgtccaggtgctcgacgatattgaaaaatgtctggagaagaagcagcagagcgta

SEQ ID NO: 130 - DNA, 2250 bp, Artificial Sequence
  Codon optimized sequence that encodes an MCM polypeptide with the A499T mutation
atgctgcgggccaagaaccagctctttctgctcagcccccattacctcaggcaggtgaaagagtcatctggatccaggcttatccagcagagactgctacaccagcagcagccactgcatccagagtgggcggccctcgctaagaaacaactgaaaggcaagaatcccgaagatctaatctggcatacacctgaggggatcagtatcaaacctctgtacagcaaaagggacactatggatttaccggaagaacttccaggcgtaaaaccattcactcgcggcccatatccgaccatgtacacatttaggccatggactatacgccagtacgctggcttttccaccgttgaagaatcgaataagttttacaaagataatatcaaagctggacagcaaggtctgtctgtcgcatttgacctcgcaacccacaggggatacgactctgacaaccctcgagtccgcggcgatgttggcatggccggagttgcgatcgacactgtggaagacacaaaaatcctgtttgacggaatcccacttgagaaaatgtcagtgagcatgactatgaatggggcggtgatccctgttttggccaactttattgtgacaggggaggagcagggcgtgcctaaagaaaaattgactggtaccattcagaatgatatactgaaggaattcatggtgcgcaatacctacatcttccccccggagccgagtatgaagatcatcgctgacatatttgagtatactgcgaaacatatgcctaagttcaactcaatatctattagtggctatcacatgcaggaggctggggccgatgccatattagagttggcttatacacttgccgacggcttggagtactcgaggaccggtctgcaggctggcctcacgatcgatgagttcgctccaagattgagctttttctgggggattgggatgaacttctatatggagatcgccaagatgcgggctggccgccgcttatgggctcatctgattgagaagatgtttcaacctaaaaactcaaagtctctgctgttgagagcccactgtcagacgtcaggctggagcctgacggagcaggatccctacaataatattgtgcggacagcgattgaagccatggcagctgtatttgggggcactcagtccttgcacaccaacagcttcgacgaagctttagggctccctactgtcaagtcagccagaatcgcccggaacactcagatcatcatacaggaagagagcggcattcctaaggtagcggatccctggggtgggtcttacatgatggagtgcctcacaaatgatgtctacgatgccgccctcaagttgatcaatgagatcgaggagatgggaggaatggcaaaagccgtcgcagaggggatacccaaactgcggattgaggagtgcgccgcgcgccggcaggctcgcatcgatagtggaagcgaggtgattgtcggtgttaacaagtatcagttggagaaggaagacacagttgaggtgctggctattgataatacatcagttcgtaacagacagattgaaaaactgaagaaaataaaatcatcaagggatcaggcattagccgagcgttgtttggccgcgctgacagaatgtgccgcatcaggtgacggtaatatactggccctggctgttgatgcgagcagggctcgctgcactgtgggggagatcacagacgcactgaagaaggtcttcggggagcataaagcaaacgacaggatggtcagcggggcatatcgccaagaattcggggagtccaaggagatcacttcggccattaagagagtccacaagtttatggaaagagagggtaggcgcccccgcctcctggtcgccaaaatgggacaagatgggcatgaccgtggcgccaaagttatagcaacgggatttgcagacctcgggttcgatgtggacattggacctcttttccagacaccccgcgaagtggcgcagcaggcagtggacgcggatgtacacgccgtaggcatctctacattggcggctggtcacaagacgcttgtccctgagctcatcaaagagctgaacagcttaggccgccctgacatcctggtcatgtgtggcggagttattcctcctcaggattacgaattcttgtttgaggtgggcgtgagtaacgtgttcggacctggaactaggattccaaaagcagccgtacaagttttagacgacatcgagaagtgcttggaaaaaaaacaacagtctgtg

SEQ ID NO: 131 - DNA, 2250 bp, Artificial Sequence
  Codon optimized sequence that encodes an MCM polypeptide with the R532H mutation
atgctgcgagcaaagaatcagctgttcctactatcgcctcactatcttaggcaggtgaaggaatccagcgggtctagactcatacagcagaggctcctacatcaacagcagcccctacaccctgagtgggccgccttagccaagaagcagctcaaaggtaagaacccagaagatctgatctggcatacccctgaaggcatctccattaagccattatattctaagcgggacactatggatcttccagaggaattgccaggggtaaaaccattcacccgagggccctatcccacgatgtacactttcagaccttggaccatcagacaatatgcagggttctcaacagttgaggagtctaacaagttctataaagacaacatcaaggctggacaacagggattgtcagtggcatttgatttagccacccatcgggggtacgattctgataatccaagggtgagaggtgacgtgggaatggcaggggtggccattgataccgttgaggacaccaagattctctttgacggtatccctctggagaaaatgagcgtgtccatgactatgaatggcgcggtgatccccgttttggccaatttcatcgtcactggggaggaacaaggcgtcccgaaggagaagctgacaggaactatccaaaatgatatcctgaaagagttcatggtccgcaacacatatattttcccacctgaaccgtccatgaaaattattgcagacatcttcgaatacactgcgaaacacatgccaaagttcaacagtatcagtatctccggctaccatatgcaagaggctggagctgacgcaatcctggaactggcttacacattagccgatggtttagagtactcccgtacagggctacaggctggtctgactatcgatgagtttgccccacgactcagtttcttctgggggataggtatgaatttctatatggagatcgccaagatgagagcaggcaggcgcctttgggctcatctcatcgagaaaatgtttcagcccaaaaatagcaagtccctcctactcagagcccactgccagaccagcgggtggtctctcacagagcaggatccttacaacaacatcgttcggactgcaatcgaagccatggcagcagtgtttgggggcactcagagcctgcatacaaactcattcgatgaggccttgggtctccctacagttaagtctgcccgaatcgccagaaacactcagatcatcatccaggaggagtccggcatcccaaaggtggcagacccgtggggtggcagttatatgatggaatgtcttaccaatgacgtgtacgacgctgctctaaagttaataaacgaaattgaggaaatgggagggatggcgaaagctgtcgccgaaggaatcccaaagcttcggattgaggagtgcgctgctaggcgtcaggctagaatagactcggggagcgaagtcatagtgggagtcaacaagtaccagctggaaaaggaggacgccgtcgaggtgctggccattgataatactagcgtacgaaaccggcaaattgaaaaactgaagaaaatcaagagctctagggaccaggctctggccgagcactgcctggctgccctgacagaatgcgctgcatctggggacggcaatatcctggctctggctgtcgatgccagtcgagcccggtgcaccgtgggcgaaatcactgacgctctcaagaaagtgtttggcgagcataaagcaaatgatcgcatggtgtctggcgcctaccgccaagagttcggcgaatctaaggaaataacttctgcaataaaacgggtccacaaatttatggagcgcgaagggcgtaggccgaggcttctcgtcgctaagatgggccaggatggccatgatagaggtgccaaagtgatcgctactggattcgcggacctgggcttcgatgtggatattggtcccctcttccagacccccagggaagtggcccaacaggctgttgacgcagatgtgcacgctgtgggaatcagcaccctggctgctgggcataaaaccctcgtaccggaattgattaaggaattaaacagcttggggcgtcccgacattctggtcatgtgtgggggggtgatcccaccacaggattacgagtttctcttcgaagttggagtcagtaatgtctttggtcctggtacaaggattcccaaggctgctgtgcaagtcctggacgacattgagaagtgcttagagaagaagcagcagtctgtg

SEQ ID NO: 132 - DNA, 2250 bp, Artificial Sequence
  Codon optimized sequence that encodes an MCM polypeptide with the R532H mutation
atgctaagagctaagaatcagctgtttctcttatcaccccactacttacgccaggtgaaggaatcatctggatcgagactaatccagcagcgtctgcttcatcagcagcagcccttacatccggaatgggcagcacttgctaaaaaacagctcaagggaaagaatcctgaagatcttatctggcacactccggagggcatctcaatcaaaccgttgtatagcaaacgcgatacaatggatctacccgaggaactgccaggagtgaaaccattcacccgcggaccctaccccactatgtacactttccggccctggacgatccggcaatacgccggcttcagcaccgtggaggagtcaaataaattctataaggataatatcaaggcgggacagcagggtcttagtgtggcgttcgatcttgccacacatagaggatacgattcggacaatccacgcgtacggggagatgtcggcatggctggggtcgccatagatacagtcgaagacactaagatcctcttcgacggaatcccccttgaaaagatgagtgtgtcgatgacaatgaacggggccgtcattccggtgctagccaattttatagttactggagaggagcagggcgtgccaaaggagaaactcacaggtacaatccagaatgacattctgaaagagttcatggtacgcaacacttacatctttccacccgagcccagtatgaaaataatcgccgatatcttcgagtacacggcaaaacacatgccaaaatttaattccatcagcatttccggatatcacatgcaggaggccggggccgacgcaatcttagaactggcctacaccctggcggacggattagagtattctaggaccggcctgcaggccggcttaactattgatgaattcgctcccagattgagtttcttctggggaataggtatgaatttctacatggagatcgcaaagatgcgtgccggacggcgcctgtgggcccacctaattgagaagatgtttcagccgaagaatagcaagtctcttctcctgagggcccattgtcagaccagcggctggagccttacggagcaggatccttacaacaatattgtgagaaccgccattgaggccatggccgccgtcttcggtgggacccagtcgctgcacacaaactcctttgacgaggccctgggtttgccgacggtgaaatcggcgcgcatcgcccggaatacccagatcatcatccaggaggagtccggaatcccaaaggtcgctgatccttggggaggtagttacatgatggagtgtctgactaatgatgtgtacgatgcggccctgaaactgatcaacgagattgaagaaatgggggggatggcaaaggccgtcgccgagggcatcccaaagttgcgcatcgaagagtgtgctgcacggagacaggctagaatcgattctggttccgaggtcattgtcggggtgaacaaatatcaactggagaaagaagatgcagtggaagtgctggcaattgataacacaagcgtgcgcaaccgccaaatcgagaaactgaaaaaaattaaaagctctcgggatcaagccctcgcagaacactgccttgcagctctcacggagtgcgctgcttccggagatggaaacatcttagcgctggcagttgatgcatcccgagcccgctgcaccgtaggggagattacagacgcattgaaaaaggtttttggtgagcataaagccaatgatcgcatggtaagtggagcatatagacaggagtttggggagagtaaggaaataacaagcgccatcaagagggttcacaagtttatggaacgggaggggagacgcccacggctcttagtggcaaaaatgggacaagacggccacgaccggggcgctaaagtgatcgccaccggcttcgcggacctgggatttgatgtggacatcggtccgctgttccagactccgcgggaggtagcccagcaggcagtggacgccgatgtccatgcggttgggattagcacactggcagctggacacaagaccttggtgcccgagctgattaaggagttaaactcactggggcgacccgatatacttgtgatgtgtggcggagttatcccgccccaagactacgagttcttattcgaggtgggtgttagcaacgtatttgggccaggcactaggatccctaaagctgctgtgcaagtcctagacgacatcgaaaagtgtctagagaaaaaacagcagtctgtc

SEQ ID NO: 133 - DNA, 2250 bp, Artificial Sequence
  Codon optimized sequence that encodes an MCM polypeptide with the R532H mutation
atgctccgtgccaaaaatcagctctttctattatctccacattacctacggcaagttaaggagtcttctggctcgcggctcattcaacagagattactacaccagcagcagcccctgcatcccgagtgggcagcattggccaagaagcagctgaaaggtaagaatcccgaggacctgatctggcacacccccgaaggaatctctattaaacccctttacagcaaacgcgacaccatggacctgcccgaggagctgcccggggtgaagccatttactagagggccatacccaaccatgtacacatttagaccctggacaattagacagtacgcgggctttagtacagtcgaagagagcaacaaattttataaggacaatatcaaggccgggcaacagggcctctcagtggcctttgacttggctactcacagaggctacgatagcgataacccccgggtacgtggcgatgtgggtatggccggagtggcaatcgataccgttgaagacactaagattcttttcgacggcattccacttgaaaagatgtctgtcagtatgacaatgaatggtgctgtcatcccggttttggccaattttattgtcacaggcgaggaacaaggcgtgccgaaagagaagttaacaggcactattcagaatgatatcctcaaggagttcatggtgcggaacacttacatcttcccaccagagccatcgatgaagataatcgccgacatcttcgagtataccgctaagcacatgcctaaatttaacagcatttctatctccggctaccacatgcaggaggccggcgcagatgcaatcctggagctggcttatacgctggccgacgggcttgaatacagccggaccggcctccaggctggcctgacgatcgacgaatttgccccccggctttcttttttctggggcatcggaatgaacttctacatggagattgcgaaaatgcgagctggtcggcgcctctgggcccatttgatcgagaaaatgttccagccaaagaactcaaagtcactgttactacgagcccattgccagacatcaggctggtccctaaccgagcaggatccctacaataatatagtgcgaactgcaatcgaggctatggctgccgtgttcgggggaactcagtcactgcataccaactcatttgacgaggcactcggtttgccaacggtgaagtccgctaggatcgcacggaatacccaaataattatccaggaggaatctggtattcctaaggtggcagatccctggggcggtagctacatgatggagtgtctcaccaacgatgtgtatgacgcggctctgaagctgattaacgagattgaggagatggggggaatggcgaaagctgttgccgaaggcattcctaagctgcgcatcgaggagtgcgcagcccgccgtcaggccagaatcgatagcggttccgaagtaatcgtgggagtaaataaataccagctggaaaaggaggatgctgtagaagtgctcgccatagataacacttcagttcgtaataggcagatcgaaaaactgaagaaaataaaatcctcccgtgatcaggctcttgccgaacattgcttggcggccctgacagagtgtgcagcctccggggacggcaacatcctggctctggcggtcgacgcaagccgggcccggtgcactgtgggtgagattacagacgctctgaagaaagtattcggcgagcataaggcgaatgataggatggtcagcggtgcttaccgccaggagtttggcgagagcaaagaaattacctctgctataaaaagggttcacaagtttatggagagggagggacgtagacctaggcttctggtcgcaaaaatgggccaggatggccacgacaggggggctaaagtgattgcaactgggtttgcagaccttggttttgacgtagacataggacctttgttccaaacccctcgcgaagtcgctcagcaggctgtcgacgccgatgtgcacgccgtcgggatttcgaccttggctgctggtcacaagactttggttcccgaattaataaaggaattaaactcgctcggccgacctgatatccttgtgatgtgcggcggggtcatcccaccccaggactatgaatttctcttcgaggttggcgtgtctaacgttttcggccccggaacacggattccaaaagcggctgtgcaggtgctggatgacatcgagaagtgtttagagaagaaacagcagtccgta

SEQ ID NO: 134 - DNA, 2250 bp, Artificial Sequence
  Codon optimized sequence that encodes an MCM polypeptide with the R532H mutation
atgctgcgcgccaagaaccagctcttcctgctttctccccactacctaaggcaagtgaaggaaagtagcgggagccggctcatccaacaaagattgctacaccagcagcaacccctgcacccagagtgggctgcactggccaaaaagcaacttaagggcaaaaatccagaggatctgatctggcacaccccagagggaatctctatcaaaccactctactctaagcgggataccatggaccttcccgaggaactgccaggggtgaagcccttcactagaggaccctacccgaccatgtacacatttcggccatggaccatccgacagtatgccggtttttctacagttgaggaatccaataagttctacaaggacaacatcaaggcagggcaacagggcctttccgtcgcgtttgacctcgcaacacacaggggctacgatagtgataacccacgggtaagaggagatgttgggatggccggcgtggctatagacactgtggaggatacgaaaattttattcgatgggatccccctggagaagatgagtgtgagcatgaccatgaacggcgctgttatacccgtccttgcaaactttatcgtcacaggtgaggagcagggtgtgcccaaagagaagctcacgggtacgatccagaacgacattcttaaggagtttatggtgagaaatacatatatcttcccccctgaaccttccatgaagattatcgctgatatcttcgagtacaccgccaagcacatgccaaaatttaactccattagtatctcagggtaccacatgcaggaggccggcgccgacgcaattctcgagcttgcatatacactggcagacggactcgaatattcacgcacaggccttcaggcaggtctcactatcgatgagtttgctcctcgactgtcttttttctggggtatcggcatgaatttttacatggaaatcgctaagatgcgcgccggaaggcggttgtgggcccatctgatcgagaagatgttccaaccaaaaaacagtaaatcccttcttctgagagcgcactgccagaccagtgggtggagtttaactgagcaggatccgtacaacaatatcgttcgaaccgccattgaagcgatggcggcggttttcggcggcacacagtccttacatacgaattcattcgacgaggccttgggcctgccgaccgtcaagtcagcaaggatcgcgagaaacactcagataataatccaggaggagtccggaatacctaaggtggccgatccttggggtggatcttatatgatggaatgcctgactaacgatgtctacgatgccgcgctgaagctaataaatgaaatcgaggaaatgggaggtatggccaaggccgtagctgagggtattccaaaactgcgtatcgaggaatgcgctgccagaaggcaggcgagaatcgattcaggcagcgaggtcattgtaggcgtaaacaaataccagttggagaaggaagacgcagttgaggttctcgctattgacaatacatctgtgcgaaaccggcagattgaaaaactaaaaaaaattaagagctcgcgggaccaggcactggctgagcactgcttggctgcactgaccgagtgtgcagccagtggtgatggaaatatcctggccctcgccgtcgacgcctcacgagcccggtgcaccgtgggcgagattactgacgcactgaagaaggtgtttggcgaacacaaggcgaacgaccgaatggtatcaggggcctaccgccaggaatttggagagtcgaaggagatcacaagtgctatcaaacgcgttcacaagttcatggagcgcgaagggcgccggccgcgtctactcgtagccaagatgggacaggacggacacgaccggggagctaaggtgatagcgaccggcttcgccgatctggggtttgacgtggacattggaccattgttccagacgcctcgagaggtggcccagcaagccgtcgatgccgatgtccacgcggttggcatatctacccttgccgctgggcacaagaccctcgtacctgagttgataaaagagttaaactccctggggaggccagatattctggtcatgtgtggtggtgtcatcccaccccaggattatgagtttttattcgaggtgggtgtcagcaatgtctttggcccggggacacgcatccccaaggccgccgttcaggtgttagatgacattgaaaagtgcttggagaaaaagcagcagtccgtt

SEQ ID NO: 135 - DNA, 2250 bp, Artificial Sequence
  Codon optimized sequence that encodes an MCM polypeptide with the R532H mutation
atgctgcgcgcaaaaaaccagctgtttctcctcagtccccactacctgcggcaggtgaaggagtcttccggcagtagactgatacagcagcgccttctccaccagcagcagccactgcacccagagtgggccgcgctcgcaaaaaaacaactgaagggcaagaatcccgaggacctgatctggcatactccggaaggcatcagcattaagccactttacagtaaacgagacaccatggatctgccagaggaactaccaggcgtgaagcctttcacaagaggaccttacccaacaatgtatactttccgtccatggactattcgacagtatgcggggttctcaacagtggaggaatccaataagttctacaaagacaatatcaaggccggccaacagggcctgagtgttgccttcgacttggccacccaccgtggatacgattctgacaacccaagggtgcgtggtgacgtcggaatggcaggcgtggcaatcgataccgttgaagacaccaaaattctcttcgacggaatcccacttgagaagatgagcgtaagcatgacaatgaacggagctgtgatccctgttctggcaaattttattgtgacaggtgaggaacaaggggttcccaaggaaaagctaacgggcactatccaaaatgatatattaaaggagttcatggtgcgtaacacctatatttttccaccagaacccagcatgaaaatcatcgccgacatttttgaatatactgcaaaacatatgcccaagttcaattccatcagtatatccgggtaccacatgcaagaagccggagccgatgcaatcctcgagctggcctatactctcgccgatgggttagagtacagtcggactggcctccaagcagggctaactatcgacgagttcgccccaagattatctttcttctgggggataggtatgaatttttacatggagatagccaagatgcgggcaggaaggcgactgtgggcccatttgatcgagaaaatgtttcagccaaagaatagcaaatccttgcttctcagggctcattgtcaaaccagcggatggagcctgacagagcaggatccctacaacaacatagtgcggacggctatcgaggccatggccgccgtgtttggggggactcaatccctgcataccaattcgttcgatgaggctctgggactgccaactgtcaaatcagcccgcattgcacgcaatactcagataattatccaggaagaaagcggcatccctaaggtcgccgacccctggggcgggagctacatgatggagtgtctcacaaacgatgtttatgacgccgctctgaaactcattaacgaaatagaggaaatgggaggtatggccaaagcagtggccgagggtatcccgaaactccggattgaggagtgtgcagctaggcggcaggcacgcattgatagtgggagcgaggtgattgtgggcgtgaacaagtaccagctcgaaaaagaggacgccgtcgaagtactggctatagataacacttctgtaagaaatcgccaaattgaaaaattaaagaagataaagagtagccgcgaccaggctctagcagagcactgtctcgcagcactcaccgagtgcgctgcaagtggggatggtaatatcctggctctggctgtggacgcaagccgggcccggtgtacagtaggcgaaatcaccgacgccctcaagaaagtttttggcgagcataaggccaatgaccggatggtgagcggcgcctatcggcaagaatttggcgagtccaaagagattaccagtgctatcaaacgggtgcataagttcatggaaagagagggccggcgccctcggcttttggtggcaaaaatgggccaagatggtcatgatagaggcgcgaaagtcatcgcaaccggcttcgccgacctgggcttcgacgttgatattggcccactattccagacccctagagaagtggcccaacaggccgttgatgccgacgtgcacgcagtgggtattagcacacttgcagctggccacaaaacactggttcctgagctcatcaaagagctgaatagcttaggccggcctgatatcctggtgatgtgcggcggcgttattccgccccaggattatgaattcctgtttgaggtcggtgtgagcaatgtcttcggtccaggaacaagaattcccaaggcagccgtgcaggtactcgatgacatcgagaaatgcctggagaagaagcagcagagcgtt

SEQ ID NO: 136 - DNA, 2250 bp, Artificial Sequence
  Codon optimized sequence that encodes an MCM polypeptide with the R532H mutation
atgctgcgcgccaagaaccagttgttcctattaagcccccactacctcaggcaggtgaaggagtcaagtggatctcgactgatccaacaaagattattgcaccagcagcagcccctccatcctgagtgggccgctcttgcgaagaaacagctcaaggggaagaatcctgaggacctgatttggcacaccccagaaggaatcagcatcaagcccttgtatagcaagagggacaccatggatcttcctgaggagctcccgggtgtgaaaccattcacaagggggccgtatcccacaatgtacacttttcgaccctggacgatccggcagtacgcaggattctcgactgtggaagaatccaacaagttttataaagataacatcaaggccggccagcaaggactgtctgttgctttcgacctagccacccacagggggtatgacagcgataatccgcgcgtaaggggagatgtgggcatggctggcgtggcaatcgacaccgttgaggacaccaagatattattcgatgggatcccactggagaagatgtccgtctccatgaccatgaacggagcagtcatacccgtgttggcgaactttatcgtgaccggggaagaacaaggtgttccgaaagaaaagctgacgggcaccattcaaaatgacattttgaaagagttcatggtacgcaatacctacatcttcccccctgagccctctatgaagatcatcgcagacatcttcgaatacacggccaagcatatgccaaagttcaatagtatcagtatcagtgggtaccatatgcaggaagccggcgcggatgccatcttggagttggcctatacattggcagatggccttgagtattctaggacaggactccaagccggcctgacaattgacgagttcgctccacgcttgagcttcttctgggggatcggaatgaacttttacatggagattgccaaaatgagagccgggcgccggctttgggcacacctgatcgaaaagatgttccagcccaaaaactctaaatctcttctgctacgcgcccattgccagaccagtggatggtcacttactgagcaggatccttataacaacatcgtcagaacagccattgaggccatggccgcagtatttgggggcacccagtccctgcatacaaacagctttgacgaagccttgggactgcctacagtgaaaagtgccaggatagctcgcaatacacagatcattatccaggaggagagtggcatcccaaaggttgcggacccgtgggggggcagttatatgatggaatgcttaaccaatgatgtgtatgacgcggcgctgaaactgatcaacgaaatagaagaaatgggcgggatggcaaaagctgtggccgaaggaattcccaagctgagaattgaagaatgcgcagcccggcgtcaagccaggatcgacagcggatccgaagttatcgtgggggtaaataaatatcagcttgaaaaagaggatgcagtggaagtcttggcaatcgacaatacgtctgtacggaatcggcagatcgaaaagctcaagaagataaagtcaagtagggatcaggcccttgctgagcattgccttgctgctttaacagaatgtgccgccagcggggatggcaacatcctagccctagctgtggacgcttcgagggctaggtgtaccgtgggggagataaccgatgcactgaagaaggtctttggagagcacaaagcaaacgatcgcatggtgagtggggcctacagacaggaattcggtgaaagcaaagaaattacaagcgcaatcaagagagtgcataagttcatggaacgagagggaaggagacctcggctgctggtggcgaaaatgggtcaagacgggcacgacagaggagccaaagttattgcgaccggattcgctgatttggggtttgacgtcgatatcggaccactgttccagaccccccgagaagtagcgcagcaggctgtggatgcagacgttcatgctgtaggtatttcaacactggcagcaggccacaagaccttggtccctgagctgataaaagagctcaattctttgggcagaccagatatactcgtgatgtgcggaggtgtgatccccccacaggactatgagttcctgttcgaggtgggagtgtcaaacgttttcggccctggaacgcgaatccccaaagcagcagtgcaggtcctagatgacatcgaaaaatgcttggagaagaagcagcaatccgtg

SEQ ID NO: 137 - DNA, 2250 bp, Artificial Sequence
  Codon optimized sequence that encodes an MCM polypeptide with the R532H mutation
atgttgcgagctaagaatcagcttttcctcctatcccctcactacctccgacaagtgaaggagtccagtggttctagactgatccagcaaaggcttctgcaccagcagcaaccgttgcaccctgagtgggctgctctcgccaagaaacaactgaaggggaaaaatcctgaagatctcatctggcacacccctgaaggcatttccatcaagcccctctacagcaaacgagataccatggatctgcccgaggagctgcccggagtaaagccttttaccagggggccctatcccaccatgtatactttccggccttggactattagacagtatgccgggttttctacggtggaggagtcaaataagttttacaaggataacatcaaggctggtcagcaaggcctgtcagtggcttttgatctcgcgactcatcggggttacgattccgataatccacgggtgcgaggagatgtgggcatggctggggtcgccattgacacagtggaggacacaaagatccttttcgacggcatccctctggagaaaatgagcgtgagcatgaccatgaatggtgccgtgataccagtgctggccaattttatcgtgactggggaggagcagggagtgcccaaggagaagctgacaggaacaattcagaatgacatactgaaggagtttatggtaagaaacacctacatctttcccccagaacccagcatgaagataattgccgacatcttcgaatataccgcgaagcacatgccgaagttcaactctatcagcatctctggatatcacatgcaggaagcaggagccgacgccatccttgagcttgcgtacactttggccgacggccttgagtactcacggaccggccttcaggcaggacttacaatagacgagttcgccccgagactgtcctttttttgggggattgggatgaacttttacatggagattgccaaaatgcgggccgggagaagattatgggcgcacctgatcgagaaaatgttccagcctaagaactccaagtcactgcttctgcgggcccactgtcagaccagcggctggagtctgactgagcaggacccttacaacaacatcgtgcgcaccgcaatagaggccatggctgctgtgtttggagggacccagtctcttcataccaattccttcgacgaggcactgggcctgcccaccgtgaaatctgcccgtattgcccggaacactcagatcatcatccaggaagagtctggcattccgaaagtggcggacccctggggaggatcgtatatgatggagtgtttgaccaatgatgtctacgacgctgcactgaaacttatcaacgagatcgaggaaatgggtgggatggccaaggctgttgccgaggggatccctaaactccgaattgaagaatgtgccgcacgccggcaggcccgcatagactcgggctcagaggtcattgttggggtaaataaataccagttggagaaggaggatgccgttgaggtcctggccatcgataacaccagcgtgagaaataggcaaattgagaagctgaaaaaaattaagtcttcaagggatcaggccctggcggagcactgtctagccgccctaactgagtgtgccgcctcaggcgatggcaacattctggctctggctgtggacgcgtcccgcgctaggtgtacagtgggtgagattacagacgcactcaaaaaggtgttcggggaacacaaggctaacgaccgtatggtgtcaggagcctaccggcaggagtttggcgaatcgaaggaaataacatcagccattaagagggtgcacaagtttatggagagagagggaagacgcccccggctgctagtggcaaaaatgggccaagatggccacgaccggggagcgaaagttattgcaacagggttcgcagatttgggattcgacgttgacatcggtccgctgtttcagacaccccgagaggtggcacagcaggctgttgacgcggatgtgcacgccgtggggatttctacgctcgccgccggacataagacgctagtcccagagttgattaaggagcttaactccctgggcaggccggatattctggttatgtgtgggggagtcatcccgccacaggactacgagttcctgttcgaagtcggggtctctaatgtgtttggaccgggcactagaatcccaaaggccgctgtgcaggtcctggacgatatcgagaaatgtctcgaaaaaaagcagcagtcggtg

SEQ ID NO: 138 - DNA, 2250 bp, Artificial Sequence
  Codon optimized sequence that encodes an MCM polypeptide with the R532H mutation
atgctgagggccaagaatcaactgttccttctgtcccctcactatctgcgccaggtcaaagagtcatccggcagcaggctcatacagcaaaggctgcttcaccagcagcaacccctacacccagaatgggcagctttggcgaaaaagcagttgaaaggtaagaacccggaagacctgatctggcacacccccgagggcatttcaatcaaacccctgtatagcaaacgggacacaatggaccttcctgaggaattgccaggggtgaaacccttcacccgagggccatacccaactatgtacactttcagaccttggaccatcagacagtatgctggatttagcacggtggaggaatcaaacaagttttacaaagataatatcaaggccggtcagcaggggctgagcgtcgcgttcgacctggcgacacaccggggatatgattccgataatcctcgggtcagaggggatgtggggatggccggcgttgccattgataccgtcgaggacaccaaaatactgttcgacggaatccccctcgagaaaatgagcgtgtctatgacaatgaatggggctgttattccggtcctggcaaattttatcgtcacaggagaggagcagggggttcctaaagagaagctgacaggtacaatccagaatgatatcctcaaggaatttatggtcaggaatacctacatcttcccgcctgagccatcaatgaagattatcgccgacatttttgaatatactgccaaacacatgcccaaattcaattctatctccatatctgggtaccatatgcaggaggccggcgccgacgccatccttgaactcgcttatacactcgccgatggactggagtattctcgcactgggttacaggccggcctcactattgatgaattcgcaccaagactaagctttttctgggggatcggcatgaatttctatatggaaatcgctaagatgcgggccggaagaagactgtgggctcatctgattgagaaaatgtttcagcccaagaacagtaaatccctgctgctccgcgcacactgccagacatcaggttggtctcttaccgaacaggacccctataataacatcgtgaggactgccattgaagcaatggctgctgtgttcggggggacccaatctctgcacacaaactctttcgacgaagccctgggcctacctacagtcaagagcgccagaatcgcaaggaacactcagatcattatacaggaagagtcagggatacctaaggttgccgatccctggggcggctcctacatgatggagtgcctaacaaatgacgtgtatgacgccgcactcaagctgatcaacgaaatagaagagatgggaggtatggcaaaagcagtagctgaaggcatacctaaattgcggatcgaggagtgcgccgcgaggaggcaagccagaatcgatagtggaagtgaggtaatcgtaggcgtgaataagtatcagctggagaaagaagacgccgtggaggttctagccatcgataacacctcagtgaggaaccgtcagattgaaaagcttaaaaagatcaaatcatcacgggatcaggctctagccgagcactgcctggccgcactgactgaatgcgcagcttctggcgatggaaatatcctggcactagcagtggacgcgtctcgggctcgatgtacagttggagaaataacagatgccttaaagaaagtatttggggaacataaagcaaacgataggatggtgagtggggcttaccgacaggagtttggcgaaagtaaagagatcacatcagctatcaaaagagtgcataagtttatggaacgcgagggacggaggcctcggttgctggtggccaaaatgggccaggatggccacgatcgcggggccaaggtcattgctactggctttgctgatttgggatttgacgtggacatcggtcctttgttccaaacgcccagagaggtggcccaacaggcggtggatgccgacgtgcacgcggtcggcatctctactctggcagcaggacacaaaaccctggtcccagagctgataaaggagctgaattcacttggccgccccgacatcctcgtgatgtgcgggggtgttattcctccccaagactacgagttcctgttcgaagtgggcgtcagcaatgtgtttggacctgggacgagaatacccaaggccgccgtgcaggttttggatgatatcgagaaatgcctagaaaagaagcaacagtcggtc

SEQ ID NO: 139 - DNA, 2250 bp, Artificial Sequence
  Codon optimized sequence that encodes an MCM polypeptide with the R532H mutation
atgctacgggccaagaatcagctttttctcttatcccctcactatctgcgacaggtaaaggagagctccgggtcacgcctgattcagcaacggttactccaccaacagcaaccgttgcatcctgagtgggccgcactcgcaaagaagcagctgaaagggaagaacccagaagacctcatatggcatacgcccgaaggaatctccatcaagcccctttacagcaagagagacacaatggatctgccggaagaattgcccggcgtgaagccttttactcggggaccatatccaactatgtatactttcagaccctggaccattcgccaatatgccggcttttctacagtggaggaaagtaacaagttttataaggataatataaaagccggacagcaggggctgagtgtggcctttgatcttgccacacacaggggctacgattcggacaatccccgcgtcaggggtgacgtgggaatggctggcgtggctatcgataccgtggaagacactaagattttgttcgacggaatcccactcgaaaagatgtcagtttctatgaccatgaacggcgccgtgatccctgtcttggcgaatttcatcgtaacaggcgaggagcagggtgtgccaaaggaaaagctcacagggaccatccagaacgacatcctcaaggaatttatggtgcggaatacatatattttcccaccagagcctagcatgaagatcatcgcagacatctttgagtataccgctaaacacatgcccaagtttaacagtatttccatttcaggctaccacatgcaggaagcgggagctgacgcaatccttgagttggcatatacgttggccgatggactggagtatagccgcaccgggcttcaggcaggccttacaatcgatgagttcgcacccaggttaagtttcttttggggtattgggatgaatttttacatggaaatagcaaagatgcgggccggcagacggctgtgggcgcatctgatagagaagatgttccagccgaagaacagtaaatcactgctgttgcgggctcactgccagaccagcggatggtctctgactgaacaagacccctacaacaatatcgtgagaactgccatcgaggctatggccgcagtctttggaggcacccagtctctacacacaaattctttcgacgaggccctcgggctgcccaccgtgaagagcgctcgtatcgcgcgtaatacccaaattattatccaagaggagtctggcattcctaaggtggccgacccttggggcggttcatatatgatggagtgcctcactaacgacgtctacgacgccgcactcaagctgattaatgagattgaggagatggggggcatggcaaaagctgtggccgaaggcatccccaaactcagaatagaagaatgcgccgccaggcgacaggctaggatagattcaggctccgaagtcattgtgggcgtgaacaaatatcaattggagaaggaggacgccgtagaggtgctcgcaatcgacaatacatccgttaggaacagacaaatcgaaaaactgaagaaaattaaaagctcacgcgatcaggctctggcagagcattgtctggccgctctgacagagtgcgccgcaagcggggatggcaacattctggcactggccgtggacgcaagccgcgctagatgtacggtcggggaaatcacagatgccctcaagaaagtgttcggagagcacaaagccaatgatcggatggtctctggagcctaccgacaagagttcggtgagagcaaagagattacaagcgcgattaagagggtgcacaagttcatggagcgtgagggacggcggccaaggctgctcgtggcgaagatgggacaggatgggcatgaccggggcgctaaagtgattgcaacagggtttgcagatctgggatttgatgtagacattggccccttattccaaaccccgagggaggtagcacagcaggcagtagatgccgatgtgcacgccgtggggatttccaccttggcagccggtcacaaaacgctagtgcctgagctgatcaaagaactcaatagtcttggaaggccagatatactggtcatgtgcgggggtgtgattccgccccaggattatgagttcctgttcgaggtaggtgtgagcaacgtgttcggccctgggactcggataccgaaggccgctgtgcaagtcctggacgatattgaaaagtgcctcgagaaaaagcagcagtccgtc

SEQ ID NO: 140 - DNA, 2250 bp, Artificial Sequence
  Codon optimized sequence that encodes an MCM polypeptide with the R532H mutation
atgctgcgcgctaagaatcagcttttcctgctcagccctcactatcttcgtcaggtaaaagagtctagcggttccaggctcatccagcagagattgttacaccagcagcagcctctgcaccctgaatgggccgcactcgcaaagaaacagctgaaaggaaagaacccggaagacctcatctggcatacaccagagggcatctcaatcaagccactttactccaaacgggatactatggacctccctgaggagctgcctggcgtaaagccctttactcgtggaccgtaccctacgatgtatacctttagaccatggaccatcaggcagtacgcaggctttagtactgtcgaggagagcaataaattttataaagataatatcaaggccgggcagcagggactctcagtcgcgtttgacctggccactcatcgcggttacgacagcgacaatcctcgagtgagaggggacgtgggcatggctggtgtcgcgatagacactgtggaagatacaaagatcctatttgacggaattcctcttgagaaaatgagtgtttcaatgacaatgaatggggcggtgatccctgtgcttgccaactttatcgttactggcgaagaacaaggcgttccaaaagagaaactgactggaaccattcaaaatgacattttaaaggaattcatggtccgaaatacttacatctttccacccgagccaagtatgaagattattgcagacatctttgagtatactgccaaacacatgcctaagttcaacagcatttctatctcagggtaccacatgcaggaggccggcgcagacgcaattctggagctggcgtatacacttgctgatggtctcgagtacagccgcacaggactgcaagccggtctgactatcgatgagttcgctcccagactctcttttttctggggaataggcatgaatttttatatggagatagcgaagatgagagccgggaggcggctatgggcgcacttgatcgaaaaaatgtttcaaccaaagaattcgaagtcgctcttgctgcgcgctcactgccaaacgtccggctggtcactgactgaacaggatccttacaacaacattgtcaggactgccattgaggcgatggcagcagtgtttggggggacccaatccttacacactaatagctttgacgaggcccttggactccccacggtgaagagtgcaaggattgctagaaatacccagattatcattcaggaggagtcaggcataccaaaagtcgcagacccctggggggggtcatacatgatggaatgcctcactaacgatgtctacgatgcagcgctgaagctcatcaacgaaattgaagaaatgggaggaatggccaaagccgtagcagaggggattcccaaactgaggatagaggaatgcgccgcccggcgccaggcgcgcattgacagcggctccgaagtgattgtcggcgttaacaaatatcagctcgaaaaagaggacgctgtggaggtccttgccatagataacacatcagtgcggaaccgccagattgagaagcttaaaaagataaagagctcacgggaccaggccctggccgagcactgtctggcggccctcaccgagtgcgccgccagcggggacggcaacatacttgccttagccgtggacgcctcgagagcaaggtgcacagtcggagagattaccgacgctcttaagaaggtcttcggagagcacaaggctaatgacagaatggtttctggcgcatataggcaggagtttggtgaatcaaaggaaatcacatctgcaatcaagagagttcacaagttcatggaacgggaggggcggaggcctcgactgctggtcgcaaaaatggggcaggacggccacgatcgcggggctaaggtgatcgccaccggcttcgccgacctggggtttgacgtggatattggaccactgtttcagacacctcgcgaggtggctcagcaggccgtggatgccgatgtgcatgccgtagggatctccaccctggccgccggacacaagacactcgtaccagagctgattaaagaactcaactcacttgggcgacccgacattctagtcatgtgtggtggagtgataccaccccaggactacgaatttctgtttgaagttggtgtgtctaatgtattcggccctggcacacgaattcctaaagctgctgtgcaggtgttggatgacatcgaaaagtgcctcgagaagaagcagcagtctgtt

SEQ ID NO: 141 - DNA, 2250 bp, Artificial Sequence
  Codon optimized sequence that encodes an MCM polypeptide with the T598A mutation
atgctccgggcaaagaatcagttatttctgttaagcccgcattacttgagacaagtgaaggagtccagcggatctcggttaatccagcaacgactgctgcaccagcaacagcctcttcaccctgaatgggctgcactggccaagaagcaattgaagggcaaaaaccccgaagacctgatttggcacaccccggagggaatctcgataaagcccttgtactccaagagggataccatggatctccccgaagaattgcctggcgtcaaaccgttcactcgggggccataccccaccatgtacacattccgcccttggacaatcagacaatatgccggattctctaccgtggaggaatccaacaaattctacaaagataatatcaaggctgggcagcagggactatcggttgcatttgacctggctacccaccgcgggtatgacagtgataaccccagagtaaggggagatgtcggcatggctggcgtggccatcgatactgttgaagacaccaaaatcctgttcgacgggattcctctcgaaaaaatgtctgtgtccatgactatgaacggcgcagttattcctgtgctggccaatttcattgtaacgggcgaggagcagggagtgccaaaggagaagcttacgggcaccatacagaacgacatcctaaaggagttcatggtgagaaatacttacatctttccccccgaaccctctatgaagattatcgctgacattttcgaatataccgccaaacacatgccgaaattcaactccatctccatttccggctaccacatgcaggaggccggcgccgatgccatcctagaactcgcctataccctcgcagacggattggaatacagtcgcactggcctccaagcaggactgacaatcgatgagtttgctcccagactttccttcttctggggcattggaatgaacttttatatggaaattgcaaaaatgagggccggcaggcgcctgtgggctcacctcattgaaaagatgttccagcccaaaaacagcaagtctttgttgttaagagcccattgtcaaacatctggatggagcctgaccgaacaggacccatacaataacattgttaggacggccattgaggccatggcggccgtattcggcggtacccaatccttacacaccaatagctttgacgaagccttgggcttgcctacagtgaagtctgccaggattgcgcgcaatacccagattataatccaggaggagagcggcattccaaaagtcgcagacccgtgggggggtagctatatgatggagtgtcttaccaacgacgtatacgatgctgctctgaagctcatcaacgaaatcgaagagatgggagggatggccaaggcagtcgccgaggggattcccaaattacggattgaagagtgtgccgcgaggaggcaggccagaattgatagtggatccgaggtgatcgttggggtgaataagtatcaacttgagaaagaggacgccgttgaggtgctcgccatcgacaatacatcagtcagaaacaggcaaatcgagaagctgaaaaagatcaaaagctcgcgagaccaggcactggccgaacgatgcttggccgctctcaccgagtgcgcggcctctggagatgggaatatcctcgccctcgctgtcgatgcatctcgtgcgcggtgcacagtgggtgagattaccgatgccctgaagaaagtgttcggggaacacaaggctaacgaccgaatggtttcaggagcctataggcaggagttcggcgagtcaaaggaaatagcttctgcgattaaacgtgtgcataagttcatggagagggagggacggcgccccagacttttagtcgccaagatgggtcaggatggccacgacaggggcgctaaggtgatcgctacaggcttcgcagacttagggttcgatgtcgacattggacccctttttcagactccacgggaagtagctcagcaggctgtcgatgccgacgtacatgccgtaggcattagtaccctggctgctggccacaagacactcgtcccagagctgattaaagaattaaacagtctcggccggcccgacatactggtcatgtgcggtggagtcatccctcctcaggattatgagttcttgttcgaagtgggggttagtaatgtgttcggcccaggcacacgaatccctaaggccgccgtgcaggttctggacgatattgaaaagtgcctggaaaagaagcaacagtcggtg

SEQ ID NO: 142 - DNA, 2250 bp, Artificial Sequence
  Codon optimized sequence that encodes an MCM polypeptide with the T598A mutation
atgctccgggctaaaaaccaactctttcttttgtctcctcactatctgcgacaggtcaaagagagctccggaagcagattgatccaacagcggctgctgcatcagcagcagccactacatccagaatgggccgctctggcaaagaagcagttgaaaggtaaaaatcctgaggatctgatatggcacaccccagagggtatatccattaaacccctttactctaagagagacacgatggacctccctgaagagttgcccggggtgaagcccttcactcgcgggccatatccaacaatgtacacattccgcccgtggacaatccggcagtatgccggattttccactgtggaagaatctaacaagttttataaggataatataaaggcgggccaacagggtctgtctgtggccttcgatctggccactcatcgcggctacgactcagacaatccaagagtgagaggcgacgtcggcatggctggtgtcgccatcgacactgtagaagataccaaaatcctcttcgacggaatacccctggaaaagatgtcagtttctatgactatgaatggcgccgtcatccctgtcctcgcaaacttcatagtgacaggagaagaacagggagtacctaaagagaagttaactgggacaatccagaatgatatcctgaaagagtttatggtacgcaatacttacatcttcccacctgagcccagtatgaagattatcgctgatattttcgaatatacagccaaacacatgccaaaattcaactctatctcaatcagtggctaccacatgcaggaggccggcgccgacgcaatccttgaactggcatacacgctggccgatggcctggaatatagtcggactggcctgcaggccgggctgactattgacgaatttgcaccccgtctgtcttttttttggggaatcggcatgaatttttacatggagatcgccaagatgagggctggcaggcgtctgtgggctcacctgatcgaaaagatgttccaacccaaaaattcgaagtccctgcttttaagggctcattgccagaccagtggctggtctctcaccgagcaagatccctataacaacatcgtgagaactgccattgaagccatggcagcagtattcggcggcacgcaaagtctccacacaaattcatttgatgaagccttggggttacccaccgtaaagagcgctcgcatcgcccggaatacccagattattattcaggaggagtcgggtatccctaaggtcgctgatccatggggaggctcttacatgatggaatgcctgacgaacgacgtttacgatgcagcactgaaactcattaatgagatcgaagagatgggaggtatggccaaggccgtggccgagggcatccctaaactgaggatagaggagtgtgctgcacgaaggcaggcacgtatcgactctggctctgaagttatcgtgggggtgaataagtatcagctcgagaaagaggacgccgtcgaagtgctggctatagacaatacctctgtacggaatagacaaattgagaaactcaagaagataaagagtagcagagaccaagctcttgcggagcgatgccttgccgctttgactgagtgcgccgcctctggcgacggaaacattctggctcttgcagtggacgcctcgcgggcccggtgcacagttggcgagattactgacgctttgaagaaagtctttggcgagcacaaagctaacgaccgaatggtgtccggagcctatcggcaagaatttggagagtccaaagaaattgccagcgccattaaaagagttcacaagtttatggaacgcgagggccgacgacctagattgctagttgcgaaaatgggtcaggacgggcatgatagaggggccaaggttatcgctaccggattcgctgacctcggtttcgacgttgatatcgggccattattccaaaccccacgggaggtggcccaacaagccgtagatgctgatgttcacgccgttgggatcagtaccctcgcagcaggtcataaaaccctggtacccgagctgattaaggagctgaattccttgggccgtccggacatactcgtcatgtgcggcggcgtaatcccaccccaggactatgagtttctgttcgaagtcggcgtcagcaatgttttcggcccgggcactcgcattccgaaagccgcagttcaggtgctcgacgacatcgaaaaatgcctggagaagaagcagcagtctgta

SEQ ID NO: 143 - DNA, 2250 bp, Artificial Sequence
  Codon optimized sequence that encodes an MCM polypeptide with the T598A mutation
atgctgcgcgccaaaaaccaactgttcctgctgtcacctcactacctccggcaagtgaaagagagcagtggttcaagactgatacagcaacggcttctccaccaacagcaaccactgcaccccgaatgggccgctctggctaagaaacagctcaagggcaagaatccagaggatctcatatggcatacccctgaaggcatcagcattaaacccctttatagcaagagggataccatggatcttcccgaggagcttcccggcgtaaagccctttacaagagggccttatcctaccatgtacacgtttaggccatggacaattaggcaatatgctggatttagtacagtggaagaatctaataaattctataaagacaatattaaggcaggccagcaaggtttgagtgtggcctttgatctggctacccaccgcggttacgatagtgacaaccctagggtacgcggagatgtcggtatggctggagtcgctatagatacggtcgaagatacaaaaattttgttcgacggaattcccctggagaagatgtctgtgagcatgacgatgaatggggctgtgatacccgttctggcaaacttcatcgtgaccggagaggagcaaggcgtcccgaaggaaaagctgaccgggaccatccagaatgacatcctcaaggaattcatggtaaggaatacctacatattccccccggagccttctatgaagatcattgcggacattttcgagtacactgcaaagcatatgccgaaatttaactccatttcaatttctggttaccacatgcaggaggccggcgccgatgcaattctggaactcgcttacactctcgccgatgggctcgaatacagtcggacaggactccaggcaggacttactatcgatgagttcgcacccaggctgagtttcttctggggaattgggatgaatttctatatggagatcgcaaagatgcgtgcgggtcggaggctgtgggcgcatcttattgaaaagatgttccagccaaaaaatagcaagtctctcttactcagggcccactgtcagacgtcagggtggtctttaacggagcaagatccttataacaacattgtcaggacggccatcgaggctatggccgcagtcttcggggggactcagtctctgcacacaaacagctttgacgaggccctgggtctaccaacggtcaaaagcgctagaatcgctcgcaatactcagattatcatccaagaagaaagtgggattcccaaggtagctgacccttggggggggtcgtacatgatggaatgtttgacaaacgacgtgtatgacgccgctctgaaactgattaacgaaatcgaagagatgggtggaatggctaaggctgttgcagaggggatcccaaaacttagaatcgaggaatgcgctgcgcgcagacaggctagaatagatagcgggtcagaggtgatagtgggggtgaacaaataccaactcgagaaagaagatgccgttgaagtgctggctatagataacactagtgtccggaacagacagatcgaaaaattgaaaaagataaaaagtagtagagatcaagccttggctgagcggtgcctggccgcactgacagaatgtgccgccagcggggatggcaacattctggccttagccgtggacgccagccgggctagatgtactgtaggggagattacagacgccctgaagaaagtgtttggagagcataaagccaatgacaggatggtgtcaggcgcctatagacaggaatttggggagagcaaagagatagcttctgccattaaacgtgtacacaaattcatggaaagagaggggcgccgcccgcgcttactggtggccaagatggggcaggacggacatgatcgaggtgccaaggtcatcgcaactggattcgcagatcttggatttgatgtggatattgggcctctcttccagactcctcgggaggtcgcccagcaggcggttgacgcagacgtacacgccgttggcatctcaactctggcggcgggacacaaaacacttgtccctgagctgatcaaggagctgaactccctgggaagacctgacattctggtcatgtgcggcggagtcattcctccccaggattacgagttcctgttcgaagttggagttagtaacgtgtttggccccggtacccgtatccctaaggccgcagtgcaggtactggacgacatcgagaagtgcttagagaagaagcagcagtctgtc

SEQ ID NO: 144 - DNA, 2250 bp, Artificial Sequence
  Codon optimized sequence that encodes an MCM polypeptide with the T598A mutation
atgcttagggcaaagaaccaactatttttgctgagtccgcattaccttaggcaggttaaggaaagtagtggctcccgtctgattcagcaaaggctactgcaccagcagcagccactgcaccctgagtgggccgcgttggcgaagaaacagctgaagggcaagaatccagaagaccttatatggcacacccccgagggcatctcaatcaaaccgttatattcgaagagggataccatggatttgcccgaggagctgcccggcgtcaagccctttactagggggccttatccgacaatgtacacattccgaccttggaccattcgtcagtacgcgggtttctctacagttgaagagagcaacaagttttataaggacaatatcaaggcgggccagcaggggctgagtgtcgcctttgatctcgctacacaccgaggatacgatagtgacaaccccagggttaggggcgatgttgggatggctggagtggccattgatacagtagaggatactaaaatcctctttgacggcatacccctggaaaaaatgagtgtctccatgactatgaatggagcagtaatcccagttttagcaaatttcattgttacgggagaggagcagggggtgcccaaagagaagctgactggcacaatccagaacgatatattaaaggaatttatggtgaggaatacgtacatcttccctcccgagccttcaatgaaaatcattgcagacattttcgagtacacagctaagcacatgcccaagttcaattccatttccatctcaggctaccacatgcaggaggcaggcgccgatgccatcttggagctggcctatacgttggccgacggcttggaatattcccgcaccggactccaggccgggctaaccattgatgaattcgccccaaggctgtcatttttctggggtatcggaatgaacttttacatggagatagctaagatgagagctggtcgacgcttgtgggctcatttgatagagaagatgttccaacctaaaaattccaagtctctcctgctgcgcgcccattgccagacttcgggttggtctctgaccgagcaggacccctacaataatattgtgaggacagcaattgaggccatggctgctgtttttggcgggacacagtcccttcacacaaactcatttgatgaggccctgggcctgcccaccgtgaagtcagcacgcattgcaagaaacacccagattatcatacaggaagaatccggtatccccaaggtcgccgacccgtggggcggtagctacatgatggagtgcttgacaaacgacgtatacgacgccgccctgaaactgattaacgaaattgaagagatgggcgggatggctaaggccgtagccgaaggtattcccaaactgagaatcgaagaatgcgccgctagaaggcaggcacgcatcgactccggttctgaggtcatcgtgggggtgaacaagtaccagcttgagaaggaggacgctgttgaggtcctggctatcgataacacgtcagtgagaaatagacaaatcgagaagctcaagaaaattaaatccagccgcgatcaggctcttgccgagaggtgccttgccgcactcacagagtgtgccgcctcaggcgacgggaatatattggcactggcggtggatgcaagcagagcgagatgcactgtcggtgaaatcacagacgcacttaagaaggtctttggggaacacaaggcaaacgatcgcatggtctccggggcctatcggcaggagtttggagaatcaaaggagattgcctccgccatcaagagagtgcataaattcatggaacgagagggtaggcggcctaggctgctggtggcaaagatgggccaggacggacatgatcggggtgccaaggttattgcgacgggctttgcggatctgggatttgatgtcgacatcggcccactctttcagactcctcgcgaggtcgcccagcaggctgtggatgcggacgttcacgctgtcgggatctcaacactcgctgccggccacaagacgttagtgcctgaattaattaaagaactgaatagcttaggccggccagacatattggtgatgtgcggtggcgtgattcctccccaggactatgaatttctctttgaggtgggggtctcgaatgtgttcggcccaggcaccaggatccctaaggctgcagttcaggtgctcgatgatatcgagaagtgcctagagaagaaacagcagtcggta

SEQ ID NO: 145 - DNA, 2250 bp, Artificial Sequence
  Codon optimized sequence that encodes an MCM polypeptide with the T598A mutation
atgttacgcgccaaaaatcagcttttcttactttcaccccattacctgcgccaggtcaaagaaagctccggatctcgacttatccagcaaagactacttcatcagcaacagccgttgcaccccgaatgggcagccctagcaaaaaagcagctcaaagggaaaaaccctgaggaccttatctggcatactcccgaaggaatctcaatcaagcccctctactctaaaagggataccatggatctgcccgaagagttgcctggggttaaacccttcactcgagggccataccccactatgtacacatttcgtccgtggactatccgacaatatgccgggttttctacggtagaagagagtaataagttttacaaagacaatattaaggccggtcagcaggggttaagcgtggcgttcgacttagctacgcatcgcggctatgactccgacaacccccgggttaggggggacgtgggcatggctggcgttgcaatcgataccgtggaagataccaaaattcttttcgacggaatacctttggagaaaatgagcgtctctatgaccatgaacggagcagtgattcccgtgcttgccaatttcatcgtcactggcgaagaacaaggggtgcccaaggaaaaattaactggcacaatccaaaacgacatcctgaaggaattcatggtgcggaacacctatatctttccacctgagcctagtatgaagatcatcgccgacatcttcgaatatactgctaagcatatgcccaagttcaacagtatttcaatatcgggatatcacatgcaggaggcaggtgccgacgccatcctggaactggcctacacattggctgacgggctggaatactccagaaccgggctgcaggcgggtctgaccatcgacgagtttgctcctcggttatcttttttctggggaatcggaatgaatttctatatggagatagctaaaatgcgcgccgggcgaagactctgggcccacctgatcgaaaaaatgttccagcccaaaaatagtaagagtctccttctccgggcgcactgtcagacttcaggatggtcgctcaccgagcaagatccatacaataatattgtccggaccgctatcgaggctatggcagcagtttttggcggaacccagtctctgcacacaaattccttcgatgaggctttgggactcccaacagtgaagagcgccagaatagcacggaacactcaaatcattatccaggaggaaagtggtatcccaaaagtcgcggatccatggggcggaagttacatgatggaatgcctcaccaatgacgtatacgacgccgccctcaagctgataaacgagatcgaggagatggggggtatggctaaggccgttgcagagggcattcctaaacttagaatcgaggaatgcgccgctagacggcaggcgagaattgactcaggttctgaggtgatcgtgggcgtgaacaagtatcaacttgaaaaggaggatgccgtggaagtgctggccatagataatacctccgtcaggaaccggcagatcgagaagttgaagaagatcaaaagcagccgggaccaggccttggctgaacgctgcctcgctgcactgaccgaatgcgctgcatctggcgacggaaatatcctcgcccttgcggtcgacgcatcgcgggctcgctgtacagtgggagaaatcactgacgcgctgaaaaaggtctttggtgagcacaaagcgaatgatcgaatggtgtccggagcttataggcaggagtttggtgagtctaaggaaatagccagtgcgattaagagagttcacaaatttatggagcgggaggggcgccgcccccgcctgctcgtcgcaaagatgggccaggacggccacgatcggggtgcgaaagtgatcgcgaccggcttcgccgatttgggctttgacgttgacatagggcccctgttccagacaccaagagaggtcgcgcagcaggcagtagacgccgatgtgcatgctgtcggtatcagtactctagctgctggacataaaaccttagtgcctgagctgatcaaggaacttaacagtctcggaaggcctgatatcctggtgatgtgtgggggtgtgatcccacctcaagactatgaattcctgttcgaagtcggcgtgtcaaacgtgtttggcccagggacgcggataccaaaagccgcagtgcaggtcctggatgacattgagaaatgtctggagaaaaagcagcagagtgtg

SEQ ID NO: 146 - DNA, 2250 bp, Artificial Sequence
  Codon optimized sequence that encodes an MCM polypeptide with the T598A mutation
atgctcagggccaaaaaccagctttttctcctctctccacattacctgcgacaggtgaaagaatcaagcggttcaaggctgatccagcagcgcctgcttcaccaacaacagccacttcacccggaatgggccgctctggccaagaaacaactcaaggggaaaaacccagaggacctcatctggcatactcccgagggaatctctattaagcctctttactccaagagggataccatggatctgcctgaagagctgccaggagtgaagccattcacccgaggaccttatccgacaatgtatacattccgcccttggacgatccggcagtacgctggcttcagtaccgtggaggagagcaacaagttctacaaggataacattaaggctggccagcagggactaagcgtagctttcgacctcgccactcataggggttacgacagcgacaatccgagagtcagaggggacgttggcatggctggcgtcgccatcgataccgtggaggataccaagattcttttcgatggaatcccactagaaaagatgtccgtgtcaatgacaatgaatggcgctgttatccctgtgcttgcaaacttcatcgtcacaggggaagaacagggggtgcctaaagagaagcttactggcacaatccagaacgacatactcaaagagtttatggttcggaatacctatattttccctcccgaaccttcgatgaagattatcgctgacattttcgagtatactgccaagcacatgcctaaatttaactccatctctattagcggctatcacatgcaagaggccggtgccgatgccatcctagagctggcctacactctcgccgacggcctggagtactcacgcactggtctgcaggctggcctaaccatcgatgaattcgcacccaggttgagttttttctggggaatcgggatgaatttctatatggagatagcaaagatgcgcgctgggcggagactgtgggcccacctgatcgaaaagatgtttcaacccaagaactcaaaaagcctattgctccgcgctcactgtcagacttctggatggagtttgactgagcaagacccgtataacaacattgtgagaacagcaattgaggccatggccgctgtcttcggaggcacacaatccctccatacaaattcctttgatgaggcgctcggcctcccaacggtgaagagtgcacgaattgcccgtaatactcagatcattattcaagaggagagtggaatcccaaaggtagcggacccctgggggggttcatacatgatggagtgtctcaccaacgacgtgtatgacgcagccctgaaactgatcaacgagatagaggagatgggaggaatggccaaggctgtggctgagggaatcccaaagctgagaatcgaagagtgcgccgcacgaagacaggccagaatcgacagcggttcagaagtgattgtgggagtgaacaaatatcagctcgagaaagaagatgccgtcgaggtcttggccattgacaatacttctgtgagaaatagacaaatcgagaaacttaagaaaatcaagtcaagtagggaccaggccctcgcggagcggtgtctcgcagccctgacggagtgcgccgccagcggcgacgggaacatcctcgcgctggccgtggatgcatccagagctcgctgtaccgtgggcgaaattactgatgcactcaaaaaggtctttggggaacacaaagcaaacgaccgcatggtctctggagcctaccgccaagagtttggcgagagcaaagagatagcatctgccatcaagagggtgcacaaattcatggagcgagaagggaggaggccccgcttgctcgttgcgaagatgggacaggatggccacgaccgtggcgctaaagtaattgccaccgggtttgccgaccttggctttgatgtggatatcgggccactgttccagactcctcgcgaggtagcccagcaggccgtggatgcggacgtccacgcagttggaattagcaccttggcggcgggccacaagactctggtacctgaacttatcaaggaactgaactctctgggtcgtccagatattctggtcatgtgcggcggggtgattcctccgcaggactacgaatttctatttgaggtcggggtttccaacgtctttgggccgggcactaggataccaaaggccgctgtccaggtgcttgacgatatcgagaaatgcctggagaagaagcagcagagtgta

SEQ ID NO: 147 - DNA, 2250 bp, Artificial Sequence
  Codon optimized sequence that encodes an MCM polypeptide with the T598A mutation
atgctgagggcaaagaatcagctgttcctgctgtcccctcactacctccgtcaagtgaaggagagctctggttcgcggttaattcagcagagactgcttcatcaacagcaacccctccaccccgaatgggctgccctggccaagaaacagctcaaaggtaagaaccctgaggacctgatctggcacacacctgaagggatcagcatcaagcctctctactccaagcgcgacactatggatctgccagaggagctccctggcgtaaaaccattcacccggggaccctatcctacaatgtacacctttcggccttggactatcagacagtacgctgggttctctacagtagaagagagcaataagttttacaaggataatataaaagctggtcagcagggcctcagtgtagccttcgacctagctacacacagaggatatgattccgataatccgagagttcggggagatgtcggcatggccggagtggcaatagacaccgtggaagatactaagatcctgttcgatggcattccgctcgaaaaaatgagtgtcagcatgactatgaacggcgctgtgatccccgtgcttgcaaactttatcgtaaccggggaggaacagggtgtgccaaaagagaaactcacaggaacaattcagaacgatattcttaaggagttcatggtcagaaacacatacattttcccacccgagccttcaatgaaaatcatcgccgacatattcgagtacaccgctaaacacatgccaaaatttaattcaattagtatcagtgggtatcatatgcaggaggcaggcgccgacgctattctggagctggcttacaccttggccgatggtctggaatattcacgcaccgggctgcaagctgggttgaccatcgacgaatttgcaccacgtctgtccttcttttggggaattggcatgaacttttacatggagattgcaaagatgcgggcaggacggaggctctgggcccatctcattgagaagatgtttcagcccaaaaactccaaatctttactgctgcgcgcccactgccagacttcgggctggtcgctgaccgaacaagatccttacaacaacatagttcggaccgcaatcgaagctatggctgccgtgttcgggggcacgcagtctctccacactaactccttcgacgaagccctaggtcttccaacagtgaagtccgctagaattgcccgaaatacccagatcattattcaagaggaatctggaatccctaaggtcgctgacccttggggcggtagctacatgatggagtgtctgaccaacgacgtgtacgatgccgcactaaagctcatcaatgagatagaagagatggggggaatggctaaagctgtagcagaaggcatccccaagctgcggatagaagaatgtgcggcacgcagacaagcccgcatagacagtgggtccgaagtgatcgtgggtgtaaataagtaccagctcgagaaagaggatgcggtggaggtactggccattgacaatacaagtgtcaggaaccgacagattgagaagctgaagaaaattaaatcctctagggaccaggccctggctgaaaggtgtctggcggcattgaccgaatgcgcagcaagcggcgacggaaacatactggcattggcggtagacgcaagccgtgctcgatgtactgttggcgaaatcactgatgcgctcaagaaggtttttggcgagcacaaggctaatgatcggatggtctctggggcctacagacaggaatttggagaatccaaggagatcgctagcgcaattaaaagagttcacaaatttatggagcgcgagggaaggagaccccggctgctcgtcgcaaagatgggccaagacggccatgatcgcggcgcaaaagtcatcgcaacgggctttgccgatctcgggtttgatgtcgatattggcccactgttccagacacccagggaagtggctcagcaagccgtcgatgccgatgttcacgccgtgggcatctcaacactagctgccggccataagacactagtaccagaactgatcaaggaactgaattctcttggtagacccgacatcctcgtgatgtgtggcggggttatcccgccgcaagactacgagtttctttttgaggtcggtgtgtcgaatgtcttcggacccggcactcggattcctaaagctgcagtgcaagtgttggacgacatcgagaagtgcctggaaaagaagcaacagagtgtt

SEQ ID NO: 148 - DNA, 2250 bp, Artificial Sequence
  Codon optimized sequence that encodes an MCM polypeptide with the T598A mutation
atgctgagagcaaaaaatcagctcttcctgctgtcaccccactatctgcgacaggtaaaagagtctagcggttccagactcattcagcaacgcttgcttcaccagcagcagccgctccaccctgaatgggcagccctggcaaagaagcagctaaaaggtaagaatccagaggatctgatctggcacacacccgaggggatctccattaagcccctatactctaagagagacactatggacttacctgaagaactgccaggtgtgaagccttttaccagagggccatatcctaccatgtatacattccgaccatggactatccgtcaatatgcggggttcagcaccgtagaggagtcaaacaaattttataaggataatatcaaagctggacagcagggcctgtccgtcgcattcgatctagcaacacacagaggatatgattcagacaatcctcgggtgcggggggacgtcggaatggcgggggtcgccatcgacaccgtggaggacaccaagatactcttcgatggcattcccctcgaaaaaatgtccgtgtctatgaccatgaacggcgcggtcattcctgtgctggctaactttatcgtaaccggagaagagcagggcgtgccaaaagaaaagctgactggaacaatccagaatgatatcttgaaagagttcatggtgcggaacacatacatcttcccaccggaaccttcaatgaagatcattgctgatattttcgaatacactgcaaaacacatgcccaaattcaatagcataagtataagcggatatcacatgcaggaggctggagccgacgccattcttgaactggcgtataccctggcggacggattggaatatagcagaacaggactacaggcagggttgaccatcgacgagttcgccccaaggctgagtttcttctggggaattgggatgaatttttacatggagattgccaagatgcgcgccggtcgtcgactctgggcacatcttatcgaaaagatgttccagcccaagaatagcaagtcactgctcctgagagcgcactgccaaacgtctggctggagcttgactgagcaggacccctacaataatatcgtgagaacggctatcgaagctatggccgctgtttttgggggcactcagtctctgcacacaaacagttttgatgaagcactcggcctcccaaccgtcaagtcagcaaggatcgccaggaacacccaaatcataatacaggaagagagcggcatccccaaagtggcagatccatgggggggaagctatatgatggaatgcttgacaaatgacgtgtacgatgcagccctgaaactgattaacgagattgaggaaatgggtgggatggctaaagccgtagccgagggcattccaaaactgcgcatagaggaatgtgcagctaggaggcaggctagaatagatagcggcagtgaggtcatcgttggtgtcaacaagtaccagctggaaaaggaagatgccgttgaggtcctggctattgacaacacctcggtcagaaatcggcagatagagaagctgaagaagataaagagtagtagagatcaagcccttgccgaacgttgcctcgccgccctgaccgagtgcgccgcttcaggcgatggaaatattcttgcacttgcagtggacgccagtagggctagatgtaccgtgggtgagatcacggacgctctcaagaaagtgtttggcgagcacaaggccaatgaccggatggtgtctggcgcgtatagacaggagttcggagaatcaaaagagatcgcctctgccattaagagggtgcacaaatttatggagagagagggccggcgcccccgactgttggtggcaaaaatgggacaggatggacatgacagaggcgcaaaagtcattgccaccggatttgccgatctgggctttgacgtggacattgggccgttgtttcagactccgagggaggtcgctcagcaggccgtggatgctgacgttcatgccgtgggaatcagcaccctggccgccggacataaaaccctcgtgccagagctgataaaagaacttaactccctgggccgtcctgatatcctggtgatgtgcggtggcgtaattccccctcaggattacgagttcctcttcgaggtgggcgtctccaatgtgtttggcccggggacccgtatcccgaaggccgcagttcaggtgttggatgacattgagaaatgcttagagaagaagcagcagagcgta

SEQ ID NO: 149 - DNA, 2250 bp, Artificial Sequence
  Codon optimized sequence that encodes an MCM polypeptide with the T598A mutation
atgctgcgggcaaagaaccaactcttcctcctaagcccgcattacctgaggcaggtcaaggagagttccggctctcgtttaattcaacagcggctgctgcaccagcagcagccattacaccctgagtgggcggcgctagcaaagaaacagttgaagggaaagaaccctgaggatctgatctggcacacccctgaggggatttccatcaagccactctattctaagcgggacactatggatcttccagaagaactgcccggcgtaaagcccttcacccgcggcccttaccctaccatgtacaccttccgaccttggaccatcaggcagtacgcaggattctcaactgtggaggaatctaacaaattttacaaggacaacataaaggccggacagcaggggttatctgtcgccttcgacctggccacacaccgagggtacgactctgataacccgagagtacgcggggacgtgggaatggctggagtcgcaatcgacacagtggaagacaccaagatcctgttcgatggcatcccactggaaaagatgagtgtcagcatgacaatgaatggagccgttattcctgtgctggctaactttatcgtgacgggagaggagcagggggtgccgaaggaaaagctgacgggtaccatccagaatgacatcctgaaggaattcatggtgcggaatacttatatttttcctccagagccatccatgaagatcatcgctgacatcttcgaatacaccgccaaacatatgccgaagtttaacagtatctctatctctgggtaccacatgcaggaggccggggcagacgctatcttagagttggcctatacacttgcagacgggcttgaatatagcaggactgggctgcaagccgggctgaccattgacgaatttgcgccccgcctgtcttttttttgggggattgggatgaacttctatatggagattgcaaaaatgagagctggcaggcgcctatgggcgcacctgatcgaaaagatgttccagccaaagaattctaagtctcttctcctgagagcccactgtcagaccagtggttggtccttaaccgagcaggacccatacaataatatagtacgtacagctattgaagccatggccgcggtgtttggcggaacacagagcctccacaccaacagctttgacgaggccctgggcttaccaaccgtcaaatccgcaaggatcgccaggaatacacagattattatacaggaggaaagtggcattcctaaggtggcagatccctggggcggttcttacatgatggaatgcctgacaaatgatgtctacgatgccgccttgaaactgatcaatgaaatcgaagagatgggtggcatggcaaaagctgttgcagagggaattcctaagctgcggattgaagaatgtgcagctcgccggcaggctagaatcgactccggtagcgaagtcattgttggagtcaacaagtaccagctagagaaagaggacgcagtcgaggtgctggccattgacaacactagcgtgcggaatagacagatcgagaagctgaaaaaaataaagtcctcacgcgatcaggcgctggcagaacggtgcttagcagctcttaccgagtgcgcagcctccggcgatggaaacatcctcgccctagcggtggacgcttcgcgtgcaaggtgcacagttggcgaaataacggacgcgctgaagaaagtattcggcgaacataaagctaatgataggatggtctcaggtgcatatagacaggagttcggggaatcaaaagaaattgcttccgcaattaaaagggtgcataaatttatggaacgagagggaagacggcctcgattactagtcgccaagatgggacaggatggccacgaccgaggggccaaggtcatcgctacggggttcgcagatctcggctttgatgttgatatcggaccactgttccagacccctcgagaggtcgcccagcaggccgtcgatgccgacgtccacgcagtgggcatatccacgctggcagctgggcataaaactctcgtccccgagcttatcaaagaactgaactcactgggccgacccgacattctggtgatgtgtgggggcgtaatcccacctcaggattacgagtttctttttgaagtgggagtaagcaacgtcttcgggccagggaccaggattccaaaggcggctgtccaggtgctggacgacatagagaagtgtttagaaaagaaacagcagagtgtt

SEQ ID NO: 150 - DNA, 2250 bp, Artificial Sequence
  Codon optimized sequence that encodes an MCM polypeptide with the T598A mutation
atgcttcgagccaagaatcagctcttcctcttgagcccacactatctgaggcaggtcaaggagtcatctgggtctcggttgattcagcaacgccttctgcaccagcagcagccgctccatcccgagtgggccgccctggccaaaaaacaactcaagggaaaaaatccagaggatttgatctggcatacacccgaagggatctccataaagcctttgtatagtaagcgcgacacaatggatctcccagaggagctgcctggtgtaaaacctttcaccagagggccctaccccaccatgtacacctttagaccgtggacaatcagacagtacgctgggttctcaacagtggaagagtccaacaagttttacaaagataacatcaaagcgggccagcaggggctcagcgtggccttcgacttagccacccaccgagggtatgacagcgataatccgcgtgttcgcggggatgtcgggatggccggcgtggccattgacaccgtggaagatacaaagatcctattcgatggaatcccactggaaaagatgagcgtctctatgactatgaacggagctgttatcccagttctggcaaacttcatagtaactggtgaagaacagggcgtgcctaaagagaagttgacagggactatccagaacgacatcttgaaggagttcatggtgaggaacacgtacatttttccacctgagccatcaatgaagattatcgctgacatattcgaatataccgcaaagcacatgcctaagttcaactcaatttccatctcaggctaccacatgcaggaggccggcgcggacgctattctggaattggcttataccctcgcggatggactcgaatattcgcggacaggcctccaagccgggttgaccatcgatgagtttgcacccagactcagcttcttttggggcatcggaatgaacttctatatggagatagcaaagatgagggcaggccggcggctgtgggcccatctgatcgagaagatgtttcaaccgaagaacagtaaaagccttctcctcagagcacactgccaaaccagcggttggtccttaacagaacaggatccttataacaatattgtgaggaccgccattgaggctatggccgcagtctttggcggtacgcagagcctccataccaatagctttgacgaagctcttgggcttcctacagtgaaaagcgcccggatcgcaaggaacacccagattatcatccaggaagagagtggcatacccaaagtggctgatccttggggaggaagctatatgatggagtgcctcaccaacgatgtgtacgatgcagccttgaagttgatcaacgagatcgaggaaatggggggcatggctaaggctgttgccgaaggtatcccaaaacttaggatcgaggaatgcgctgcacgccgtcaggctagaatcgacagtggtagcgaggtgatcgtgggcgtgaacaagtatcagctcgagaaagaagatgcagtcgaggtgttagcaatcgacaataccagcgtccggaaccgacagattgaaaaactaaagaaaattaagtcctcaagagatcaggccttggctgagagatgtcttgccgctctcacagagtgtgccgcttcaggggatggaaatattctcgcactggccgtggatgcctctagagctagatgtaccgtgggggaaatcaccgatgcattgaagaaggtctttggggagcacaaagcaaacgaccggatggttagcggcgcctatcgccaggagttcggcgaatcaaaggagattgcctcagccatcaaacgtgtacataaattcatggagagggaaggtcggcgcccacgtctcctggttgccaagatgggtcaggatggccatgaccggggggcgaaagtgatcgcaacgggctttgccgatttaggcttcgatgtggatatcggacccttgtttcagacccctcgtgaagtggcacaacaggccgttgacgccgatgtacacgccgtcggcatcagcaccctggccgcaggccacaagacactggtccccgagttaattaaggagctcaactcactcgggagaccagatattttggtgatgtgcggaggggtgattcccccgcaggattacgagtttctgttcgaggttggagtgtccaatgtgtttggccctggcaccaggattccaaaggccgccgtacaggtgcttgatgatatcgagaagtgcctggaaaagaagcaacaatcggtt

SEQ ID NO: 151 - DNA, 2250 bp, Artificial Sequence
  Codon optimized sequence that encodes an MCM polypeptide with the I671V mutation
atgctgagagccaagaaccagctgttcctgctgagccctcactacctgagacaggtaaaggagagcagcggctcaaggctgatccaacagaggttgctgcaccagcagcagccccttcatcccgagtgggcagctctggccaagaaacagttgaagggcaagaaccccgaggacctgatttggcatacccccgagggcatcagcatcaagcctctgtactccaagcgcgacaccatggacctccccgaggaactgcccggggtgaaaccatttacacgcggcccctaccccaccatgtacaccttccggccatggacgattaggcagtacgctggcttcagcacggtggaggagagcaataagttctacaaggacaacatcaaggcagggcagcaggggcttagcgtggcctttgacctggccacacaccgggggtacgacagcgacaatcccagggtgcggggcgacgttggcatggccggcgttgctatcgataccgtggaggatacgaagatactgtttgacgggatccccctggagaaaatgagcgtgagcatgacaatgaacggcgctgtgatccctgtcctcgctaacttcatcgttaccggcgaggaacagggagtacctaaggaaaagctgactggaactattcagaatgacattctcaaggaattcatggtcaggaacacttatatctttccccctgaaccgtctatgaaaatcatagcagacatttttgagtataccgccaagcacatgcccaagtttaacagcatctccatctctggctaccacatgcaggaggcaggcgccgacgctattctggagctggcgtacactctcgccgacggactggagtactctcgcactggactccaggccgggctgaccatcgatgagttcgcaccgaggctgtccttcttctggggcattggaatgaacttttacatggagatcgctaagatgcgagcaggccggagactgtgggcccacctgattgaaaaaatgttccaacctaagaattccaagagcctgctgttgagagcccactgccagaccagcggctggtcgctgaccgagcaggacccctacaataacatagtgcggaccgctattgaagccatggccgccgtttttggcggcactcagagcctgcacaccaacagctttgacgaggccctgggcctgcccactgtgaagagtgccagaatcgccaggaatacccagattatcattcaggaggagtcaggaatacccaaagtggccgacccctgggggggtagctacatgatggagtgcctgacaaacgacgtgtacgatgccgccctcaagctgatcaacgagatcgaggaaatgggcggcatggccaaggctgttgccgaaggcatccccaagctccggattgaagagtgtgcggccaggagacaggctaggatagacagcggcagcgaagtgatcgtcggcgttaacaaataccagctggaaaaggaagatgctgtggaggtgctggccatcgacaacacctccgttcggaacagacaaatcgagaagctgaagaaaatcaagagcagcagagaccaggcccttgctgagcgctgtctggccgcactaaccgaatgcgccgccagcggcgatgggaatatcctggccctggccgtggacgcttctagggcaagatgcacagtgggcgagatcacagacgctctgaagaaggtcttcggcgagcataaagccaacgaccggatggtgagcggagcataccggcaggagttcggcgagagcaaagaaattacctctgccatcaaacgcgtgcataagtttatggagcgggagggcaggagaccgcggctgttggtggccaaaatgggacaagatggccacgatcgcggtgccaaggtgatcgccaccgggttcgctgacctgggcttcgacgttgatataggccctcttttccagacacctcgggaggtggctcaacaggctgtggatgccgacgtccacgcagtgggcgtgagcaccctggccgccggccacaagaccctggtgcccgagttaatcaaggagttgaattcactgggcagacctgacatcctggtgatgtgcggcggcgtcatccccccgcaggattacgagttcctgttcgaggtgggagtgagcaacgtgttcggtcctggcacacggatccccaaggccgccgtccaggttctggacgacatcgagaagtgcctggaaaagaaacagcagtccgtg

SEQ ID NO: 152 - DNA, 2250 bp, Artificial Sequence
  Codon optimized sequence that encodes an MCM polypeptide with the I671V mutation
atgctgagagccaaaaatcagctcttcctactgagccctcattacctgaggcaggtgaaggagagctcagggagccggctcatccagcagagactgctccatcagcagcagccgctgcacccggagtgggccgccctggccaagaaacaactgaagggcaagaacccagaggaccttatttggcacaccccagagggcattagcatcaagcctctctatagcaagagagacaccatggacctccccgaggagctgcccggcgtgaagcctttcacccgtggcccctacccaaccatgtacacattcaggccctggactatccggcagtacgcgggcttctctaccgtggaggagtccaacaagttctacaaggacaatattaaagctggccagcagggactgagcgtggccttcgatttggccacccacagaggatacgacagcgacaaccccagggtgaggggcgacgttggaatggccggcgtggccattgatactgtcgaggacaccaagatcctgttcgatgggatacccctcgaaaaaatgtctgtgtccatgacaatgaatggggccgtgatcccagtgttggccaattttatcgtgacaggagaggagcagggcgtgcccaaggagaagctgaccggcaccatccagaacgacatcttgaaagaattcatggttagaaatacctacatctttcctcccgaacccagcatgaagatcatcgccgatatcttcgagtataccgccaaacacatgcccaaattcaactccattagcatatccggataccatatgcaggaggctggcgccgacgccatcctggagctggcgtacaccctggccgatggcctggaatattctaggaccggcctgcaggctggactcacaatcgatgagttcgccccccgcctgagcttcttctggggcatcggcatgaacttctacatggagatcgctaagatgagagcgggacgccgcctgtgggctcacctgatcgaaaaaatgttccaacctaagaatagcaagtctctgctcctgcgggcacactgtcaaacctccggctggtcccttacagaacaggacccgtacaacaacatcgtgagaaccgccatcgaagccatggcggccgtgttcgggggcacccagtcactccacaccaatagcttcgacgaggccctgggcttgcctactgtcaagtctgccaggatcgccaggaacactcagattatcatccaggaggagagcggcattcctaaggtagctgacccctgggggggaagctacatgatggaatgcctcaccaacgacgtgtacgatgccgccctgaagctgattaatgagatcgaggaaatggggggcatggccaaggctgtagccgagggaatccccaagctgagaatcgaggagtgcgccgccaggcggcaggcccgcatcgatagtggcagcgaggtgatcgtgggcgttaacaagtaccagctcgagaaggaagacgccgtagaggtgttggcaatcgacaatacctccgtgagaaataggcagatcgagaagctaaagaagataaagagcagccgggaccaggctctggcagaacggtgcctggccgccctcactgaatgcgccgcttctggcgatggcaacattctggcccttgccgtcgatgccagccgggcccgatgcactgtgggagagatcacagacgctctgaagaaggtgttcggcgagcataaagcaaacgatagaatggtgtccggcgcctacaggcaggagtttggcgagagcaaggagatcacatctgctattaagagagtgcataagttcatggagagagagggacggcggcctagactgctggtagcaaagatgggccaggacggccacgatcggggagcaaaggtcattgctaccgggttcgccgacctgggcttcgacgtggacattggccccctcttccagaccccccgcgaagttgctcagcaggctgtggatgctgacgtgcacgctgtgggcgtcagcacactggccgctggacataagaccctggttcccgagctgatcaaggagctgaatagcctgggtcggccagacatcctcgtgatgtgcgggggtgtgatcccccctcaggattacgagttcctgttcgaggttggagtctctaatgtgttcggccccggaacaagaatcccgaaggccgctgtgcaagtcctggacgacatcgaaaagtgcctcgagaagaagcagcagtctgtg

SEQ ID NO: 153 - DNA, 2250 bp, Artificial Sequence
  Codon optimized sequence that encodes an MCM polypeptide with the I671V mutation
atgctgagggccaagaaccagctgttcctcctgtctcctcactacctgagacaggtgaaggagtccagcggtagcagactgatccagcagaggctgcttcaccagcagcagcccctccatccggagtgggctgcactggcaaaaaagcagcttaagggaaaaaaccccgaggacctgatttggcacaccccagagggaattagcattaaacccctctacagcaaacgggacacgatggacctgcccgaggaactgcccggcgtgaagcccttcacacggggcccataccccacaatgtatacattccgtccttggaccattcgccaatacgccgggttcagcacggtggaggaatccaacaagttctacaaggacaacatcaaggccggccagcaaggcctcagcgtcgcctttgacttggccacccacagaggctacgactccgacaaccccagagtgagaggcgacgtgggtatggccggcgtggccatcgacactgttgaggacaccaaaatcctatttgacggcatacccctggaaaagatgtccgtgagcatgacaatgaatggcgctgtgatccccgtgctcgctaacttcatcgtgaccggcgaggagcagggtgtccctaaggagaaacttaccggcacaatccagaacgacattctcaaggagtttatggtgcgcaacacctacattttccccccagagcctagcatgaagatcattgccgacatcttcgagtacaccgccaagcatatgccaaagtttaactccatttcaatctctggctaccatatgcaggaagctggcgctgacgccatcttagagctggcctacaccttggccgacggcctcgaatacagcaggaccggccttcaggccggtctgaccattgacgaatttgcacccagactgagcttcttctggggcatcggcatgaacttctatatggagatcgctaaaatgagagccggccggagactgtgggctcacctgatcgagaaaatgtttcaacccaagaactccaaaagccttctgctcagggcccattgtcaaacctctggatggagcctgactgagcaggacccgtataacaacatcgtcaggaccgccatcgaggccatggctgcggtgtttggcggaacccagtccttacacacaaatagctttgacgaagccctggggctgccaaccgtgaaaagcgccagaatcgcccggaatactcagataatcatccaggaggagtccgggatccccaaggttgccgacccctgggggggaagttacatgatggagtgcttgaccaacgatgtgtacgatgctgctctgaagctgattaacgagattgaggagatgggaggcatggctaaggctgtcgcggagggcatccctaagctgagaatcgaggagtgcgccgcccgccggcaggccaggattgacagcggatctgaggtgatcgtgggggtgaacaagtaccagctggagaaggaggacgccgttgaggttctggctatcgacaacaccagcgtcagaaacaggcagatcgagaagctgaagaaaatcaaaagcagcagagaccaggccctggcagaaagatgcctggctgccctgaccgagtgcgctgctagcggagacgggaacatcctggctctggccgtcgacgcttccagagccaggtgtaccgtcggcgagatcaccgacgccctgaagaaagtgttcggcgagcacaaggccaacgaccgcatggtgtccggcgcctacaggcaggagttcggcgagtccaaggagattacctccgccatcaaacgggtgcacaaattcatggagagagagggcagacggccacgcttgctcgtggccaagatggggcaggacggccacgataggggcgctaaggttatcgctacaggctttgctgatctgggcttcgacgtggacatcggccccctgtttcagacccctagagaggtagctcagcaggccgtcgacgccgacgtgcacgccgtgggcgtcagcacactggcagccggacacaagaccctcgtgcccgagcttatcaaggaactgaactccttggggcggcccgacatcctcgtcatgtgcggcggagtgattcccccccaggactatgagttcctgttcgaggtcggcgtaagcaacgtctttggccccggaactcggatccccaaggccgcagtacaggtgctggacgacatcgaaaagtgcctggagaagaagcaacagtctgtg

SEQ ID NO: 154 - DNA, 2250 bp, Artificial Sequence
  Codon optimized sequence that encodes an MCM polypeptide with the I671V mutation
atgctgcgcgctaaaaaccaactattcctgctgtccccccattacctgagacaggtgaaggagagctccggaagcaggctgatccaacagagacttctgcaccagcagcagcccctgcatcccgagtgggccgctctggctaagaaacaactgaagggaaagaaccccgaggacctgatctggcacaccccagagggcatatccatcaagcccctgtattctaagagggacactatggacctgcccgaggagctccccggcgtcaagcctttcacacgcggaccttaccccacaatgtacacattccgaccatggaccattaggcagtacgcaggattcagcaccgttgaggagtccaataaattctataaggacaatattaaggccggacaacagggcctgagtgtggcattcgacctggccacacacagaggttacgactccgataatcctagggtgagaggcgacgtgggcatggctggagtggccatcgataccgtcgaggacacaaagatcctgttcgacggcatccccttggagaaaatgtccgtgagcatgaccatgaacggcgccgtgattcccgtgctggccaactttattgtaaccggcgaggagcagggcgtccccaaggagaagctgaccggcaccatccagaacgatatcctcaaggagttcatggtacggaatacctacatttttccccccgaaccctccatgaagatcatcgccgacatcttcgagtacaccgccaagcacatgcccaagttcaactccatcagtattagcggctatcacatgcaggaggccggcgccgacgccatcctggaactggcctacacactggccgacggtctggagtacagcagaaccggcctgcaagcaggcctgaccatcgacgagttcgcccctcgactgagcttcttctggggcattggcatgaacttttacatggagatcgccaaaatgcgcgctggcaggcgactctgggcccacctgatagaaaaaatgttccagcccaagaactccaagtccctgctcctcagggcccactgtcagactagcggctggagcctcaccgagcaggacccatataataacattgtaagaacagccatcgaggccatggccgcagtgttcggagggacccagagcctgcataccaacagcttcgatgaggccctgggactgcccactgtaaagtccgctagaatagcccggaacacccagatcattatccaggaagagtccgggatccccaaggtggccgacccatggggcggcagctacatgatggagtgtctcaccaacgacgtttacgatgctgccctgaagcttatcaacgaaatcgaggagatgggcggcatggccaaagccgtcgccgaggggattccaaagctccggatcgaggagtgcgccgccagaaggcaggccagaatcgactctggaagcgaggtgattgtgggtgtgaataagtatcagcttgagaaggaagacgctgtagaggtgctggctatagataacaccagcgtcaggaacaggcagattgaaaagctgaagaagatcaagtcgagcagagatcaggcgctggccgagagatgcctggccgccctgactgagtgcgccgcctctggcgatggcaacatcctcgcactggccgtggacgctagccgggcccggtgtaccgtgggcgagataaccgatgccctgaagaaggtgttcggagagcacaaggccaacgacagaatggtgtctggcgcatatagacaggagttcggcgagagcaaggagattacgagcgccatcaagagagtgcacaagttcatggagagggagggcaggagaccacggctgctggttgccaagatgggccaagacggtcacgacagaggggctaaagtgattgccaccggcttcgccgacctgggcttcgacgtggacatcggtccactgttccagacccctagggaggtggcgcagcaggccgtggacgccgacgtgcacgccgtcggcgtgagcacactggctgccggccacaagacactagttcctgagctgatcaaggaactcaacagcctgggccggcctgatatactggtgatgtgcgggggggtgatcccccctcaggattacgagtttctgtttgaggtgggcgtgtccaacgtcttcggccccgggaccagaatcccaaaggccgcagtgcaggtattagacgacattgagaagtgcctggagaagaaacagcagtccgtt

SEQ ID NO: 155 - DNA, 2250 bp, Artificial Sequence
  Codon optimized sequence that encodes an MCM polypeptide with the I671V mutation
atgctacgagctaagaatcagctcttcctgctgagcccccactacctccgccaggtcaaggagtcgtcggggagccggctcattcagcagcggctcctgcaccagcagcagccgctccatccggagtgggccgccctggccaagaagcagctcaagggcaagaaccccgaggacctgatctggcacacacccgagggcatctcgatcaagcccctgtattccaagcgagataccatggacttgcccgaggagctgcccggtgtgaagccctttacgaggggtccatatccgactatgtacacgtttcggccttggaccatccgacaatacgccggcttttccaccgtggaggagagcaacaagttctataaggacaatatcaaagccggtcaacaagggctgtcggtcgcgttcgacctggccacccacaggggttacgactccgataatcccagggttcggggggacgtcggcatggccggcgtggcaatcgacaccgtggaggataccaagattcttttcgatggcatccccctcgagaagatgtctgtctccatgactatgaacggcgccgtgattcccgtcctggcgaacttcatcgtcaccggggaggaacagggtgtgcccaaggagaagctgactggtaccatccagaacgatatcctaaaagaattcatggtccggaatacctacatatttccgcccgagcccagcatgaagatcatcgccgacatcttcgagtataccgccaagcacatgcccaagttcaactcgatcagtatcagcggttatcacatgcaggaggcgggagcagacgccatcctggagctggcgtacaccctggccgacggcctggagtacagtcgcacaggactgcaggctgggctgacaattgacgagtttgcccccaggctctcctttttctggggcatcggcatgaacttttatatggagatagccaagatgagggccgggaggaggctgtgggcccatctaattgaaaagatgttccaacctaaaaactccaaatccctcctgctgcgggcccactgtcagactagcgggtggagcctcacggagcaagacccttacaataacatcgtccgcaccgccattgaggcgatggccgccgtgttcggcgggacgcaatctctgcacaccaacagcttcgacgaagcgctgggcctgccaaccgtaaagagcgcccgtatagcgcggaacacccagatcataatccaggaggagtcgggcatccccaaggtggccgacccctgggggggcagttatatgatggagtgcctgacgaatgatgtctacgacgcggcactgaaactcatcaacgagatcgaggagatgggggggatggccaaggctgtcgccgagggcataccgaagctgcggatcgaagagtgtgccgcccggcggcaggcgaggatcgacagcgggtccgaggtgatcgtgggcgtgaacaaatatcagctcgagaaagaggacgccgtcgaggtactggcaatcgacaacaccagcgtgcggaaccgtcagatcgaaaagctcaaaaagattaagagctccagggaccaagccctggccgaacggtgcctggccgcgctgaccgaatgcgctgccagcggtgatggcaacattctcgccctggctgtcgatgcaagcagggcccgatgcacagtgggcgagatcaccgacgcgttgaagaaggtttttggagaacataaagccaacgataggatggtgtcaggagcttacaggcaggagtttggcgagtcaaaagagatcaccagcgccatcaagcgcgtgcacaagttcatggagcgggagggccggcggcctcggctcctggtagcaaaaatgggccaggacggtcacgataggggcgccaaagtgatcgccaccggttttgccgatctgggtttcgatgtcgatattggcccgctgttccaaaccccccgggaggtggcccagcaggccgtcgatgcggacgtgcacgcggtgggagtgtccacgctggcggcaggccacaagaccctggtgcccgagctgatcaaagagctgaacagcctgggtcgcccggatatcctggtgatgtgcgggggggtaatcccccctcaggattacgagttcctgtttgaagtgggggtgtcaaacgttttcgggcccggcacccggatccccaaggcggccgtccaggtgctcgatgatattgagaagtgtctggagaagaagcagcagtcagta

SEQ ID NO: 156 - DNA, 2250 bp, Artificial Sequence
  Codon optimized sequence that encodes an MCM polypeptide with the I671V mutation
atgctgcgggccaagaaccagctctttctcctgtcccctcattacctgaggcaggtgaaggagagcagcggcagccgcctcatccagcaaaggctgctccaccagcagcagccactgcaccccgagtgggccgcactggccaagaagcagctcaagggcaagaatcccgaggacctgatctggcacacgccagaaggaatctccatcaagcccctgtattcgaaaagggacacgatggacctcccagaagagctgcccggcgtgaagccctttacccgaggtccctaccccaccatgtacaccttccggccctggaccatccggcagtatgccgggttctccaccgtggaggagagcaataaattttacaaggataacataaaggcagggcaacagggcttaagcgtggcctttgacctggcgacccacaggggctacgattcagacaacccgcgtgttaggggggacgtgggcatggccggggtcgccatcgacaccgtggaggacaccaaaatcctcttcgacggtatacccctggagaaaatgtccgtgtccatgaccatgaacggggcggtgatccccgtgctggcgaatttcatcgtcaccggagaggagcaaggggtgccgaaggagaagctgaccggcacgatacaaaacgatattctgaaagagttcatggtccggaacacctacatttttcccccggagccctccatgaagatcattgcggatatattcgagtataccgccaaacacatgcccaagttcaacagcatcagcatcagcggttaccacatgcaagaggccggagccgacgctatcctggagcttgcctacaccctggccgacggcctggagtacagccgtacaggcctgcaggcgggcctcaccatagatgagttcgcccccaggctatcctttttctgggggatcggaatgaacttctatatggagatcgccaagatgcgggccggccggcggctgtgggcccatctgatagagaaaatgttccagcccaagaattcgaaaagcctgcttctgcgggcacactgccagaccagcgggtggagcctgacagagcaggacccgtacaacaacatagtccgcactgccatcgaggccatggccgccgtcttcggtgggacgcagagcctgcacacaaactcattcgacgaggctctgggtctgcccaccgtgaaaagcgcccgcatcgcacgcaatacgcagatcatcatccaggaggaatccggcatccctaaggtggcggacccctggggcggtagctacatgatggaatgcctgaccaacgacgtctacgacgcggcgctcaagctgataaacgagattgaggaaatgggggggatggcgaaggcggtggctgagggaatacccaaactgcgcattgaggagtgcgccgcccgaaggcaggcgcggatcgatagtgggtccgaggtcatcgtgggcgtaaacaagtaccagctcgagaaggaagacgccgtggaggtgctggccatcgacaatacgtcggtgcgcaatcgccaaatagagaagctgaaaaagatcaagagcagccgagaccaggccctggccgagcgctgtctggcggccctcaccgaatgtgccgcctcgggcgatggaaatatcctcgcgctcgccgtggatgcctcccgggccaggtgcactgtgggcgaaatcacggacgccctcaaaaaggtgtttggcgagcacaaggccaatgatcggatggtgtccggcgcgtaccgccaggagttcggggaaagtaaggagattacctccgcgatcaaaagggtgcacaaattcatggagcgggagggccggcggccccgccttttagttgccaaaatggggcaggacgggcacgaccggggcgctaaggtgatcgccaccggcttcgccgacctgggcttcgatgtggacatagggcccctcttccaaaccccgagggaggtggcgcagcaggcggtggacgccgatgtccacgcggtcggcgtcagcaccctggcggcggggcataagacactcgtgccagagctcatcaaggaactgaatagcctggggaggcctgatattctcgtaatgtgcggtggtgtgatccccccgcaggactacgaattccttttcgaagtcggggtgagcaacgtgttcgggcccggcaccagaatcccaaaggcggcggtccaagtgctcgacgatatcgaaaagtgcctagaaaagaagcagcaatcggtt

SEQ ID NO: 157 - DNA, 2250 bp, Artificial Sequence
  Codon optimized sequence that encodes an MCM polypeptide with the I671V mutation
atgctgcgcgcgaagaaccagctgtttctcctgagcccacactacctgcgtcaggtgaaggagagctccggctcacggctgatccaacagaggctgctgcaccagcagcagccccttcaccccgagtgggccgcactagccaagaagcaactcaagggtaaaaacccggaggacctcatctggcatacccccgaggggatcagcatcaagcccctgtactcgaagcgggatactatggacctgcccgaagagctccctggagtgaaaccctttactcgagggccttatcctactatgtacacctttcgcccgtggactatcaggcagtacgccggcttcagcaccgtggaagagtccaataagttttacaaggacaatataaaggccgggcagcagggtctcagcgtcgccttcgacttagccacccaccgcggctacgatagcgacaaccctcgggtacggggagacgtgggaatggccggcgtagccatcgataccgtggaggacacaaagatcctcttcgacggaataccgctcgaaaagatgtcagtgtctatgaccatgaacggggcggtcatcccagtactggcaaatttcatcgtgacgggagaggagcagggcgtgcccaaagaaaagctgaccggcacgatacaaaacgacatcctgaaggagtttatggtgcgcaacacctacatcttcccgcccgagccctcgatgaagatcatcgcggacatcttcgagtacaccgccaagcacatgcccaagtttaacagcatcagcatatccgggtaccatatgcaggaggccggcgccgacgccatcctcgaactggcctataccctcgccgacggactggagtacagccggaccggactgcaggccgggctgacaatagacgagtttgcaccccggctctccttcttctgggggatcgggatgaacttttatatggagatcgccaaaatgcgtgccggtcggcgcctgtgggcgcatctcatcgaaaaaatgtttcagccaaagaacagcaaaagcctgctgctgcgagcccactgtcaaaccagcgggtggagcctgacggagcaggacccttataacaacattgtgcgaaccgccatcgaagccatggccgcggtgttcgggggcacccagtccctgcacaccaactccttcgacgaggccctcggactccccaccgtcaagtccgcgcgcatagcgcggaatacccaaatcatcatccaggaggagagcggtatcccgaaagtggccgacccttggggcggaagctacatgatggagtgcctgactaacgacgtgtacgatgccgccctgaagctgataaacgaaatcgaggagatgggtggcatggcgaaggccgtcgcggaagggatccccaagctgcggatcgaagaatgcgcagccaggcgccaggcccggatcgactccgggtccgaggtgatcgtgggcgtgaacaagtatcagctggagaaggaagatgccgtggaggtgctggccatcgacaacacctccgtgcggaacagacaaattgaaaaactcaaaaaaatcaagagcagccgcgaccaggccctcgccgaaaggtgcctggcggcgctgactgaatgcgccgcgtcgggagacgggaacatactggccctggctgtcgacgcctccagggcccggtgtaccgtcggcgaaataacggatgcgctaaagaaggtcttcggggagcataaagcgaacgaccggatggtgagcggcgcataccgacaggagttcggagagagcaaggagatcacatcagccatcaagcgcgtccataagtttatggaacgcgaaggccggcggccccgactgctggtcgcgaagatggggcaggacggccacgacagaggggccaaggtcatagccacgggctttgcggacctggggtttgacgtggacatagggcccttattccagaccccgcgggaggtggcccagcaggccgtggatgcggacgtacatgctgtcggggtgtcaacgctggcagccgggcacaagaccctggtgcccgagctcattaaagagctgaacagtctgggtaggccggacatcctcgtcatgtgcggcggagtgatcccgccccaggactacgagttcctcttcgaggtgggtgtctcaaacgtctttggccccggcacccgcatccccaaggccgccgtacaggtccttgacgacattgagaagtgtctcgagaaaaagcagcagtccgtt

SEQ ID NO: 158 - DNA, 2250 bp, Artificial Sequence
  Codon optimized sequence that encodes an MCM polypeptide with the I671V mutation
atgctgcgcgctaaaaaccagctctttctcctgtcaccgcactacctgagacaggtgaaagagtcgagtggctcaagactgatccaacaaaggctgctgcaccagcagcagcccctgcaccccgagtgggcggccctcgccaagaaacaacttaagggcaagaaccccgaggacctcatctggcatactcccgaggggatctcgataaagcccctctattcaaagagggataccatggacctgccagaggagcttcctggcgtgaaaccattcacgcggggcccataccctaccatgtacacattccggccgtggactatccgccaatatgccggattcagtaccgtcgaggagagcaataaattctacaaagacaacatcaaggcggggcagcaggggctgtccgtggccttcgatctggctacccaccgcgggtacgattccgataacccccgtgttcgcggggatgtcgggatggctggcgtagctatcgacaccgtggaggataccaagatcctgttcgacggtatccccctagaaaagatgtccgtgagcatgaccatgaatggcgccgtcatccctgtactggccaatttcatcgtcaccggggaggagcagggggtgcccaaggagaagctcacgggcaccatacagaacgacattctgaaggagtttatggtgcgaaacacctacatattcccccccgaaccgtccatgaaaatcatcgctgatatctttgagtacacggccaagcacatgcctaagttcaacagcatctccatatccggctaccatatgcaggaggccggagctgacgccatactggaactggcctatacactggccgacggactggagtatagccggaccggcctgcaagccgggctcaccatcgacgagttcgcaccgcgactaagcttcttctggggcatcggcatgaacttctacatggagatagccaagatgcgcgcaggtcgcaggctctgggcccatcttatcgaaaagatgttccaacccaagaactccaaaagcctcctgctccgcgcgcactgtcagaccagcggctggtcactgacggagcaggatccatacaacaacatcgtgcgcacggccatcgaggccatggcagctgtattcgggggcacccagtccctgcacaccaactcctttgacgaggccctgggcctccccaccgtcaagagcgcgcgtattgcgcgcaacacccagatcatcatccaagaagagtccggtattcctaaggtggccgacccctggggcggctcgtacatgatggagtgcctgaccaacgacgtgtacgacgccgccctgaagctgatcaatgagatcgaggagatgggtgggatggccaaggctgtcgccgaaggcatcccgaagctgcgcatagaagagtgcgcagcccgacggcaggcacggatcgactccgggtccgaggtgatagtgggcgttaataagtaccagctggagaaggaggacgctgttgaagtcctggccatcgacaacacctctgtgcgtaacaggcagatcgaaaagctcaagaagatcaagtccagccgcgaccaggccctggccgagcggtgcctggctgccctgaccgagtgtgccgcgtcaggggatggcaacatcctcgccctggccgtcgacgcctcccgcgccaggtgtaccgtcggggaaatcaccgacgccctgaagaaggtatttggcgagcacaaagccaacgataggatggtaagcggcgcctacaggcaggagttcggggaatccaaagagatcacctccgccatcaagcgggtccacaagttcatggaaagagagggccgtagacctcgactgctggtggccaagatgggccaggatggtcatgatcggggcgccaaagtgatcgcgaccgggttcgccgatctgggattcgacgtggacatcggccccctcttccagacgcccagggaggtagcgcagcaagccgtggatgccgacgtgcacgcggtgggcgtgtccaccctcgcggccggtcacaagaccctcgtgcccgaactcatcaaggagctgaacagcctggggcggcccgacatcctggtcatgtgtggaggcgtcattccaccccaggactatgagtttctcttcgaggtcggcgtgtcaaacgtgtttggccccggcactaggatacccaaagcggcagtccaggtcctcgacgatatcgagaagtgtctcgagaagaagcaacagtccgtg

SEQ ID NO: 159 - DNA, 2250 bp, Artificial Sequence
  Codon optimized sequence that encodes an MCM polypeptide with the I671V mutation
atgctccgtgccaagaaccagctgttcctgctgagcccccactatctccgacaggtgaaagagtcgtccggaagcaggctgatccagcaaagactgctgcaccaacagcaaccactgcatcccgagtgggccgcgctggccaagaagcagctgaagggcaagaaccccgaagatctcatctggcacacacccgagggcatcagcatcaagcccctgtattccaagagggataccatggacctgccagaagagctgcccggcgtcaagcctttcacacgaggcccctacccgaccatgtacaccttcaggccctggacgatccgacaatatgccggcttcagcaccgtggaggagagcaacaaattttacaaggacaacatcaaggccgggcaacaaggcctatccgtcgccttcgacctggcgacccaccgggggtacgacagcgataacccccgcgtgcgtggagacgtgggaatggcgggggtagctattgacacggtagaggatacaaagatcctgtttgatgggatcccgctggaaaagatgagcgtgtccatgacgatgaacggggccgtgattcccgtcctggccaatttcatcgtcacgggtgaagaacaaggcgtacccaaagaaaagctgaccggtaccatccaaaacgatatcctgaaagagttcatggtgaggaatacctacatctttccccctgaacccagcatgaagatcatcgccgacatcttcgagtataccgccaaacacatgcccaagttcaatagtatcagcatctcaggctatcacatgcaggaagccggggccgacgcgatactggagctggcctataccctggccgatggcttggaatatagccggacggggctccaggccggcctcaccatcgacgaattcgcccccaggctgagcttcttctgggggatcgggatgaacttctacatggagatcgccaagatgcgggcggggcggaggttgtgggcccatctcatagagaaaatgtttcagcccaagaactcgaagtccctcctgctccgggcacattgccagaccagcgggtggtctctcaccgagcaggatccctataataacatcgtgcgcaccgccatcgaggccatggccgccgtcttcggtggcacccagagcctccacacaaactccttcgacgaagcccttggcctgcccaccgtgaagagcgcacggatcgcccggaacacccagatcatcatccaggaagagtcagggatccccaaggtggcggatccctggggcggcagctatatgatggagtgtctgaccaacgacgtttatgatgccgccctcaagctcatcaatgagattgaggagatggggggtatggccaaggcagtggcggagggaatacctaagctccgcattgaagagtgtgccgcccggcggcaagcccggatagactccggcagcgaggtgatcgtgggcgtgaacaagtatcaactggagaaggaggacgccgtggaggtcctggccattgataacacctccgtgaggaacagacagatcgagaagctcaagaagatcaagtcaagccgtgaccaggccctcgccgaacgctgtctggctgccctcaccgaatgcgccgccagcggcgacgggaacatcctggccctggcagtggacgccagcagagccaggtgcaccgtgggcgaaataaccgacgccctgaagaaggtgttcggcgagcacaaagctaacgatcggatggtctcgggggcctaccgccaggaattcggggagtccaaggagatcacgagtgccatcaaaagagtccataaattcatggagcgcgaggggaggcgacccaggctgttggtcgctaaaatggggcaggacggccacgacaggggcgccaaagtcattgcgaccgggtttgccgacctgggcttcgacgtggacatcgggccgctgttccaaaccccccgtgaggtcgcccagcaggcggtggacgccgatgtgcacgccgtgggggtgagcacactcgccgccggtcataagacgttggtgccagagctgataaaggagctgaactccctcgggcggccagatatactggtgatgtgtgggggcgtgatacccccacaggactacgagttcctgttcgaagtgggggtaagcaacgtgttcggcccagggaccaggataccgaaggcggcggtccaggtgctggacgacattgaaaaatgtttggaaaagaagcaacagtccgtc

SEQ ID NO: 160 - DNA, 2250 bp, Artificial Sequence
  Codon optimized sequence that encodes an MCM polypeptide with the I671V mutation
atgctgcgggccaagaatcagctgtttctgctgagcccccactacctgcgtcaagttaaggaaagttcaggatccaggctgatccagcagaggctgctgcaccagcagcagccgctgcatccggagtgggccgcgcttgccaaaaagcaactgaaggggaagaatcccgaggacctgatctggcatacccctgaggggatctcaattaagccactgtactccaagcgggataccatggacctccccgaggagctgcccggggtcaaacccttcacccggggtccctaccccaccatgtacactttccgaccctggaccatcagacaatacgccggcttctccaccgtggaggagagcaacaagttctataaagacaatatcaaggcaggacagcagggcctctccgtggcctttgacctcgccacgcacaggggttatgatagcgacaacccccgcgtgcgaggcgatgttgggatggccggcgtggcgattgacaccgtggaagacacgaagatactctttgacggcatccccctcgagaagatgtccgtaagcatgacaatgaacggcgcggtcatccccgtgctggccaacttcattgttactggcgaggagcagggggtcccgaaagagaaactgaccgggaccatacagaacgacatactcaaagagtttatggtccgcaatacatatatcttcccccccgagccctcaatgaagatcatagcggacatctttgaatacacggccaagcacatgccaaagttcaatagcatcagcatctccggctatcacatgcaggaggcgggtgccgacgccatcctggaactcgcctataccctggcggacggcctggagtacagccgcacggggctccaggcgggtctgaccatcgacgaattcgccccccggctgtccttcttttgggggatcggtatgaatttttacatggagatcgccaaaatgcgcgccgggcgcaggctgtgggcccatctgatcgaaaagatgtttcagcccaagaacagcaagtcgctgctgctgcgggctcattgccagacatcgggatggtccctcactgagcaagatccctacaacaacattgtgcgcacagcgatcgaggcaatggccgcagtgttcgggggtacccagtccctccacacaaactccttcgacgaggccctggggctaccgacggtcaaaagcgcccgaatcgcgcgcaacacccagatcataatccaggaggaaagcggtatccccaaggtggcagatccgtggggcggtagctatatgatggagtgcctgaccaacgacgtctatgacgctgcactgaagctcatcaacgaaatcgaagagatgggtggcatggccaaagccgtagccgagggaatcccaaagcttcgaatcgaggagtgcgctgccaggagacaggcccgcatcgattcaggtagcgaggtgatcgttggggtgaataagtaccagctcgagaaggaggacgccgtggaagtgctggccatagacaacactagcgtacgcaacaggcagattgagaagctgaagaaaatcaagtcgagccgagaccaggccctcgccgaaaggtgcctggccgcattgaccgaatgcgccgccagcggcgacgggaacatcctcgccctggctgtggacgccagcagggccaggtgcacggtgggggagatcacggatgctctcaaaaaggtgtttggtgagcacaaggctaatgaccggatggtgtcgggcgcctatcggcaagagttcggcgaaagcaaagagatcaccagcgccatcaagcgagtgcacaagttcatggaacgcgagggcaggaggcccaggctgctggtggccaagatggggcaggacggccacgaccgaggtgccaaagtgatcgccactgggttcgcggacctgggcttcgatgtggacattggccccctctttcagaccccccgagaggtggcccagcaggccgtcgacgccgatgtgcatgcggtcggcgtgagcaccctcgctgccggtcataaaaccctcgtgcctgagctgatcaaggaactgaactcactggggcggcccgacatcctggtcatgtgtggaggagtgatcccgccgcaggactacgagttcctatttgaggtaggcgtgagcaacgtctttgggccgggaaccaggatcccaaaggctgcagtgcaggtgctcgacgatatagaaaagtgcctcgaaaaaaaacagcagtccgtg

SEQ ID NO: 161 - DNA, 2250 bp, Artificial Sequence
  Codon optimized sequence that encodes an MCM polypeptide with the I671V mutation
atgctgagagcgaaaaaccagctctttctgctgagcccccactatctgcggcaagtcaaggagtcctccggctccaggctgatacagcagcgcttactccatcagcagcagcccctgcacccggagtgggccgcgctggctaaaaaacagctgaaggggaagaaccccgaggacctcatatggcacaccccggagggtatcagcatcaagccgctgtactccaagcgggatacgatggatctccccgaggagctgccaggtgtgaaacctttcacacgggggccgtatcccaccatgtacacctttcggccttggacaatccggcaatacgccgggttttcaactgtcgaggagtctaacaagttttacaaggacaacatcaaggcaggccaacagggcctcagcgtcgccttcgatctggccacccacagggggtacgattccgacaaccccagggtgcgcggggacgtgggcatggccggcgtggccatcgacaccgtcgaagatacgaagatcctgttcgacgggatcccgctcgaaaagatgagcgtgtcgatgaccatgaacggggccgtgatcccagtgctcgccaatttcattgttaccggggaagagcagggcgtgccaaaagaaaaactcacgggaactatccaaaacgacatcctgaaagagttcatggtaaggaacacctatatcttcccccccgagcccagcatgaagatcatcgcggatatctttgagtataccgccaagcatatgcccaagttcaattcgatcagcatcagcgggtaccacatgcaggaggcaggcgccgacgccatcctggagctggcgtacacgctggccgatggactggagtactcccggaccgggctgcaggccggcctcaccatcgacgagttcgccccacggctatcctttttttgggggatcggtatgaatttctatatggagatcgccaagatgcgcgccggtcggaggctctgggcccacctgatcgagaagatgttccagccgaaaaactccaaatccctgctgctccgggcccactgccagacgtccggttggtccctgactgagcaagatccgtataataacatcgtgcgcaccgccatcgaggcgatggccgccgtcttcgggggtacccagtccctccacaccaattccttcgacgaagccctgggcctccccaccgtgaagtccgcacgtatcgcacggaacacccagataatcatccaggaggagagcgggatccccaaggtagccgatccttggggcggatcctacatgatggagtgcctgaccaacgacgtctacgacgcggccctgaagctgatcaacgaaatcgaggagatgggcggcatggcaaaggccgtcgccgaggggatccccaagctgcgaatcgaagaatgcgccgcaagaaggcaggctcggatcgattccgggagcgaagtgatcgtaggggtgaataaatatcagctggaaaaggaggatgccgtcgaggtcctggccatcgataacacctccgtccggaatcgtcagatcgaaaaactgaagaagatcaagtcgagccgcgaccaagccctggcagagcgttgcctcgccgcactgaccgaatgtgcggccagcggcgacgggaacatcctggccttagccgtggacgcctcccgtgcccggtgcacggtgggcgagatcacggacgccctcaaaaaggtcttcggagagcacaaagccaatgacaggatggtgtcgggggcctacaggcaagagttcggcgaatccaaggagatcacaagtgccatcaagcgcgtacataaattcatggagcgcgaaggtcgtcgcccccggctgctggttgccaagatgggacaggacggccacgatagaggggcgaaagtcattgccaccggattcgccgacctggggtttgacgtggacatcggtcctctgtttcagaccccccgcgaagtggcccagcaggccgtcgatgccgatgtgcacgcggtgggggtgagcactctggccgccggccacaagaccctggtacccgagctcatcaaggagctgaactccttggggcggcccgacatcctggtgatgtgcgggggagtcatcccgcctcaggactacgagttcctcttcgaggtgggcgtcagtaacgtgttcgggcctggtactcgcattcccaaggcggcggtccaggtactggacgatatcgaaaagtgcctcgaaaagaagcagcagtcggtg

SEQ ID NO: 162 - DNA, 2250 bp, Artificial Sequence
  Codon optimized sequence that encodes an MCM polypeptide with the I671V mutation
atgctgagagccaaaaaccaactgtttctcctcagcccacactatttgcggcaggtgaaagagtcgtcgggttctcgcctcattcagcaacgtctgctgcaccagcagcagccgctgcaccccgagtgggccgccctggcgaagaagcagctgaagggcaagaaccccgaggacctgatctggcacaccccggaaggtatcagcataaagccgctctactccaagcgggataccatggacctgcccgaggaacttcccggcgtgaagccctttacccgcggtccctacccgacgatgtataccttccgtccatggactatacgtcaatatgcgggcttcagcaccgtggaggagagtaacaagttttacaaggacaatatcaaggcgggccagcaaggcctgtcagtggcctttgacctcgccacccacagggggtacgacagcgacaatcctcgagtgcgtggcgacgtcggcatggcgggtgtcgccatcgacaccgtggaggatacaaagatccttttcgacgggatccccctcgaaaagatgtccgtgagcatgaccatgaacggggcagttatacccgtgctggctaacttcatcgtgacaggagaggaacaaggggtacccaaggaaaagctgaccgggaccatccagaatgacatcctgaaggagttcatggtgaggaacacctatattttcccacccgagccctccatgaagatcatagccgacatatttgagtataccgccaagcacatgcccaagtttaacagtatatccatcagcgggtatcacatgcaagaggccggagcggacgccattctcgagctcgcctacacgctggcggacggcctggaatactcccgtacggggctgcaagcggggctgaccatcgatgagttcgccccccgcctgtccttcttttggggaatcggtatgaacttctacatggagatcgccaagatgcgcgccgggagacggctgtgggcccacctcatcgagaagatgttccaacccaagaacagcaagtccctgctgctccgggctcactgtcagacttccggctggtccttgactgaacaggacccgtacaacaacatcgtgagaacggccatagaggccatggccgccgtgtttggcggaacccaatcgctccacaccaactctttcgacgaggccctgggcctcccaacggtcaaatccgcccgcatcgccaggaacacccaaatcatcatccaagaagagagcggcatccccaaggtggccgatccctggggcggcagctatatgatggagtgtcttaccaacgatgtgtacgatgccgccctgaagttgatcaatgaaatcgaagagatgggcgggatggccaaagccgtggccgaggggatccccaagctgcggatagaggagtgcgcggcaaggcggcaggcccggatagacagcgggagcgaagtgatcgtgggcgtgaacaaataccagctggaaaaggaagacgcagtagaggtcctcgcaattgacaacaccagcgtgagaaaccgccagatagagaagctcaaaaagatcaagtcctcacgggaccaggccctcgccgagcggtgcctggccgctctgaccgagtgtgccgcgtccggtgatggcaacatccttgccctcgcagtggatgcctcccgggcaagatgtacagtgggggagataacggacgccctgaagaaagtgtttggggaacataaagccaacgaccgcatggtcagcggggcctataggcaagagttcggggaatccaaggagatcacctccgccattaaacgggtgcacaagtttatggagagggagggccggaggccccgactcctggtggccaagatggggcaagacggacacgacaggggcgctaaggtcatagccaccgggttcgccgacctggggttcgatgtagacattggccccctgtttcagaccccccgcgaggtggcgcagcaggccgtggacgccgacgtccatgccgtgggtgtcagcaccctcgcggccgggcataagacactggtgcccgagctgatcaaggagctaaatagcctcgggagaccggatattctcgtgatgtgcggaggggtcataccgccccaggactacgagttcctctttgaggtgggcgtgtcaaacgtcttcggccccgggacccggatccccaaggccgccgtgcaggtgctggacgacatcgaaaagtgcctggagaaaaagcagcagagtgtc

SEQ ID NO: 163 - DNA, 2250 bp, Artificial Sequence
  Codon optimized sequence that encodes an MCM polypeptide with the I671V mutation
atgctgcgagcgaagaaccagctctttctgctgagcccccattacctaaggcaggtgaaggaaagctccggcagccgcctgatccagcagcggcttctgcaccaacaacagccactccacccggagtgggccgccctggccaagaagcaactgaaggggaagaaccccgaggacctaatctggcataccccggaaggcatctccatcaagcctctgtactccaagagagacaccatggacctgcccgaagagctccccggcgtgaagccctttaccaggggcccctatcccaccatgtacaccttccgtccgtggacaatccgccagtatgccggtttcagcaccgtcgaggagtccaacaaattctacaaggacaacatcaaggccgggcaacaggggctcagcgtggccttcgatctggccacccaccggggctatgacagcgacaacccgcgagtgcggggagatgtcggcatggccggcgtggctatcgacaccgtcgaggacaccaagatcttgtttgacgggatcccgctggagaaaatgagcgtctcaatgacgatgaatggagccgtgatccccgtgctggccaacttcatcgtcaccggtgaggagcagggcgtgcccaaagagaagctaaccggcaccatccagaacgatatactcaaggagttcatggtgcggaacacatatatcttcccccccgagccctccatgaagataatcgcggacatttttgagtacacggcgaagcacatgcccaagttcaatagcataagcatctccggctaccacatgcaggaggccggagccgatgccatcctcgaacttgcgtatacccttgccgacggcctggagtactcccgtaccggcctccaggccgggctgaccatcgatgaattcgcgcctcgtctgtccttcttctggggtatcggcatgaacttctatatggagatcgccaagatgagggccggccggcggctgtgggcccacctgatcgagaagatgttccaacccaagaactccaagtccctgctgctgcgggcccactgccagaccagcggctggagcctgacagagcaggacccgtacaacaacatcgtcaggacggccattgaggccatggccgccgtgttcggaggcacgcagagcctgcataccaactcgttcgacgaagccctgggcctgccaaccgttaaatccgcccgaattgcccgtaatacccagatcattatccaggaagagagcggcatccctaaagtggcggacccctggggcgggagctacatgatggaatgcctcaccaacgacgtctatgacgccgccctgaagctcatcaatgagatagaggaaatgggggggatggccaaggccgtcgcagaaggtatccccaagctccggatagaggagtgcgcggccaggcgccaagcccgtattgattccggttccgaagttattgtcggagtgaataaataccagctggagaaagaggacgccgtggaggtgctggccatcgataatacctcggtccgcaataggcagatcgagaagctgaagaagatcaagagctcccgggaccaggccctggctgagcggtgcctcgccgccctgacggagtgcgccgccagcggtgacggcaacatcctggctctggccgtggatgcctcccgcgcccgatgcacggtgggggagatcaccgacgcactgaagaaggttttcggcgagcacaaggccaatgaccgcatggtgagcggggcctaccgacaggagttcggcgaatcaaaagagatcacgagcgcgatcaagcgggtccacaagttcatggagcgagaagggaggaggccgcggctccttgtggcgaagatgggccaggatgggcatgatcggggagccaaggtgatcgccaccgggttcgccgacctcggcttcgatgtcgatatcgggcctctatttcagaccccaagagaggtggcccagcaggccgtcgatgcggatgtgcatgccgtgggtgtgagcactttggccgccggccataagacgctggtgcccgagctgatcaaggagctgaattccctcggcaggccagatatcctggtgatgtgcggcggggtgatccctccacaggactacgagttcctgtttgaggtgggcgtgtctaatgtcttcgggccgggcaccaggataccaaaggccgcagtacaggttctcgacgatatcgagaagtgccttgagaagaaacaacagtccgtc

SEQ ID NO: 164 - DNA, 2250 bp, Artificial Sequence
  Codon optimized sequence that encodes an MCM polypeptide with the I671V mutation
atgctacgcgccaaaaaccagctgttcctcctcagtccgcattacctcaggcaggtcaaagagtccagcggatcccggctcatccagcagcgtctactccaccaacagcagccactgcacccggagtgggcggccctcgctaaaaagcagctgaagggtaagaacccagaagatctgatctggcacacgcctgagggaatctccattaaaccgctctactccaaacgcgacaccatggatctgcccgaggagctgccgggggtgaaacccttcaccagggggccctacccgaccatgtacacctttcggccgtggaccataaggcaatacgccggtttctcgaccgtggaggagagcaacaagttctataaggacaacattaaggcagggcaacaggggctgagcgtggccttcgacctggccacccatcggggatacgattccgataatccccgggtccggggcgacgtgggaatggccggcgtggccatcgacacggtggaggacaccaaaatcctctttgacggcatcccgctggagaagatgtccgtgtccatgaccatgaatggggccgtaatccccgtgctcgcgaacttcatagtcacgggcgaggagcagggcgtgccgaaggagaaactcacaggcactatccaaaacgacatcctgaaggagttcatggtgcggaacacctacatcttcccgcccgagccgagcatgaagataattgcggatatcttcgaatacaccgccaagcatatgcccaagtttaattccatttcaatcagcggctatcatatgcaggaggccggggcggatgccatcctggagctggcctatactctcgccgacggcctggaatacagcaggaccggcctgcaggcggggctgacgatcgacgagttcgctcccaggctgagctttttttgggggatcgggatgaacttttatatggagatcgccaaaatgcgagctggccgccgcctgtgggcccatctcatcgagaagatgttccagcccaagaactccaagagtctcctgctgcgcgcgcactgccagacctccgggtggagcctcaccgaacaggacccctacaacaacatagtccggaccgcgatcgaagccatggcggccgtgtttggaggcacgcaaagtctgcacaccaacagcttcgacgaggccctgggcctgccaaccgtgaagagcgcccgcatcgccagaaatacccagatcattatacaggaggagagcggaattcccaaggtcgcggacccctggggaggttcctatatgatggagtgcctgaccaacgatgtgtacgacgccgctcttaagctgattaacgagatcgaggagatgggcgggatggccaaagcggtggccgagggaatacccaagctgcgcatcgaggaatgcgccgcccgccgtcaagcacggatcgacagtggctccgaagtgatcgtgggtgtgaacaagtaccagctggagaaggaggatgccgtggaggtgctggccatcgacaacacctccgtgaggaaccgccagatagagaaactgaagaagatcaagagctccagggaccaggccctcgccgagcggtgcctggcagcactgaccgaatgtgccgcgagcggggacgggaacatcctggccctggccgtggatgcatcccgggcccgctgcaccgtcggtgagatcactgatgccctgaagaaggttttcggggagcacaaggctaacgaccgcatggtgtccggggcgtacagacaggagtttggcgagtcaaaggaaattaccagcgccatcaagcgggtgcacaaattcatggagcgcgaaggtcgccgacctaggctgctcgtcgccaagatgggtcaggacgggcatgaccgcggcgccaaggtcatcgcgaccgggtttgccgaccttgggtttgacgtcgacatcggacccctgtttcagacccccagggaagtggcccagcaagccgtcgatgcggacgtgcatgccgtcggagtgagcaccctcgcggccgggcacaagaccctggtgcccgagctcatcaaggaactgaacagccttgggcggcccgacatcctcgtgatgtgcggcggggtgatcccgcctcaggactacgagttcctatttgaggtaggggtgtccaatgtctttggccccgggacaaggatccccaaggccgctgtccaggtcctggatgacatcgagaaatgcctggaaaagaagcagcagtccgtc

SEQ ID NO: 165 - DNA, 2250 bp, Artificial Sequence
  Codon optimized sequence that encodes an MCM polypeptide with the I671V mutation
atgctgagggctaagaaccagctgttcctgctctccccccactacctgaggcaggttaaagaatcctccggaagcaggctgatacagcagagactcctgcatcagcagcagcctctacaccccgagtgggccgccctggccaaaaagcagttgaaaggcaaaaatcccgaagatctgatctggcacacccctgaaggcatcagcatcaagccactgtacagcaagagagacaccatggacctgcccgaggagttgccaggcgtgaagccttttaccagaggcccctaccccacaatgtataccttccggccctggacaattagacagtacgcaggcttcagcaccgtggaggagtccaataagttttacaaggacaacatcaaggctgggcagcaggggctctcagtggccttcgatctggctacccatagaggctatgatagcgataatcccagagtgagaggcgacgtaggaatggccggcgtggccatagataccgtggaggatacgaaaatcctcttcgacggcatccctctggaaaagatgtctgtgagcatgaccatgaacggcgcagtgattcctgttctggccaacttcatcgtcacaggggaagagcaaggcgtgcccaaagagaagctcacgggcaccatccagaatgacattctgaaagagttcatggtgagaaacacttacatcttcccacccgaaccttcaatgaagatcatcgccgacatcttcgagtatacagccaaacacatgcctaagttcaatagcatcagcatctccggataccatatgcaggaggctggcgctgacgccattctggagctggcctacaccctggcagacggtctggagtacagcagaacaggtcttcaggccggtctgaccattgacgagtttgccccaaggctgtccttcttctggggaatcggcatgaacttctacatggagatcgccaagatgagagccggtagaagactgtgggcccacctgatcgagaagatgttccagcctaagaattccaagagcctgctgctgcgcgcccactgccaaacctctggctggtcattaaccgagcaggatccttacaataacatcgtgcgaaccgccatcgaagccatggctgctgttttcgggggaacccagtccttgcacacaaacagcttcgacgaggccctgggcctgcccaccgtgaagagcgccaggattgcccgaaacacgcagatcatcatacaggaggagtctggcattcccaaggtggccgatccttggggcgggtcttatatgatggaatgcctgacaaatgacgtctacgacgccgccctgaagctcatcaacgagatcgaagagatgggcgggatggccaaagctgtagccgagggcatccctaagctgagaattgaggaatgcgccgctagacggcaggcaaggattgacagcggcagcgaggtcattgtgggcgtcaacaaataccagctggagaaggaagacgccgtggaggtgctggccattgacaacacatctgtgagaaaccggcaaatcgaaaagctgaaaaaaatcaagtcctccagagatcaggctctggctgaaagatgcctggccgccctgaccgagtgtgccgcgagcggcgatggcaacatcctggctctggccgtggacgcaagcagagctagatgtacagtcggcgagattaccgatgcgctgaagaaggtgttcggcgaacacaaggccaacgatcggatggtgagcggcgcttatcgccaggagttcggagagtccaaggagatcacctccgcaataaagagggtgcacaagtttatggagcgcgagggaagacggccccgactgctggtggccaagatgggccaagatggccatgacagaggggccaaggtgattgccaccggctttgcagatctgggcttcgatgtggacatcggccccctgttccaaacccctagagaggtggcccagcaagccgtcgacgctgacgttcatgccgtgggcgtctccaccctggcggcaggacacaagacactggtgcctgagctgatcaaggaactgaatagcctcgggagacccgatatcctggtgatgtgcggaggcgtgatcccccctcaggactacgaatttctgttcgaggtgggcgtctcgaatgtgttcggacccggcacaagaattcccaaggctgctgtccaggtcctggacgacattgagaaatgcctggagaagaagcagcagtccgtg

SEQ ID NO: 166 - DNA, 2250 bp, Artificial Sequence
  Codon optimized sequence that encodes an MCM polypeptide with the I671V mutation
atgctgcgcgccaagaaccagctgttcctgctgagcccccactacctgagacaagtgaaggagagcagcggcagcagactgatccagcagaggctgctccaccagcaacagcccctgcatcccgagtgggctgctctcgctaagaaacagctgaagggcaagaaccccgaggacctgatctggcacacacctgagggcatatcaatcaaacccctctattcgaagcgagacaccatggacctgcccgaggaattacctggcgtgaaaccattcaccagaggcccttatcccaccatgtacacttttaggccatggacaattcggcagtacgcaggcttttccactgtggaagagagcaataagttttacaaagataacattaaggccggtcagcagggcctgagtgtggcatttgacctggctacccacagaggctatgacagcgacaaccccagagtgagaggcgacgtgggcatggccggcgtcgctatcgacaccgttgaagacacgaagattctgttcgacggcatccccctggagaagatgagcgtttccatgaccatgaacggcgctgtgatccccgtgctggccaatttcatcgtgacaggagaggagcagggcgtgcctaaggagaagttgactggcaccatccagaatgacatcctgaaggaattcatggtgcggaacacctacatcttcccccctgaacctagcatgaaaatcatcgctgacatctttgagtacacagccaagcacatgccgaagttcaacagtatcagcatctctggctatcacatgcaggaggcaggcgctgacgccattcttgaactcgcctacaccctggccgacggcctagagtactccagaacagggctgcaggctggcctgactatcgacgagtttgcccctcgcctgagctttttttggggcattggaatgaatttctatatggagatcgccaagatgcgcgctggaagaagactctgggcccaccttatcgagaagatgtttcagccaaaaaatagcaagtccctgctgctgagggcccactgccagacctctggctggagccttactgagcaggacccctacaacaacattgtgcggaccgccattgaggctatggccgctgtgttcggcgggacccagagcctgcacaccaatagtttcgacgaggccctgggattgcccacggtgaaatccgctcggatcgcccggaacacacagatcatcattcaggaggaaagcggcatccctaaggtggccgacccatggggcggcagctatatgatggaatgtctgaccaatgacgtgtacgacgccgctctgaaactaattaacgagatagaggaaatgggcggcatggctaaggccgtggccgagggcatccctaagttgcgtatcgaagaatgcgccgcccgtagacaggccaggatcgacagcggctcagaggtgatcgttggagtgaacaaatatcagcttgagaaggaggacgccgtggaagttcttgccattgacaacactagcgtccgtaacagacagatcgagaaactgaaaaagatcaagtcgagtagagaccaggctctggccgagaggtgcctggcagctcttactgaatgcgccgctagcggagacggaaacattctggccctggccgtcgacgcctcccgggccaggtgcaccgtgggagaaatcactgacgccctgaagaaggtcttcggcgaacacaaggctaacgaccggatggtgtcaggcgcgtacagacaggagtttggcgaatccaaggagatcacgagcgccatcaagagagtgcataaattcatggagcgggagggtaggaggcccagactgcttgtggccaagatgggccaggacggccatgatagaggagctaaagtaatagctacaggcttcgctgatctgggcttcgatgtggatatcggccccctgttccagaccccaagagaggtggcccagcaggcagtggatgcagacgtgcatgcggtgggcgtgagcaccctcgccgccggtcacaagacactggtgcccgagctgatcaaggagctgaatagcctgggccggcccgatatcctcgtgatgtgcggaggcgtgattccccctcaagactacgaattcctgttcgaggttggagtgtctaatgtgtttggcccaggcaccagaatccccaaagctgccgttcaggtcctcgatgacattgaaaaatgcttagagaagaagcagcagagcgtg

SEQ ID NO: 167 - DNA, 2250 bp, Artificial Sequence
  Codon optimized sequence that encodes an MCM polypeptide with the I671V mutation
atgctgagggctaagaaccagctgtttctgctttctccccactacctccgccaggttaaggagtcctctggaagcaggctcatccagcaaagactgcttcaccagcagcagccactgcaccctgagtgggccgccctggctaaaaagcagctgaagggcaagaaccccgaggatctgatttggcacacgcccgagggcatctccatcaagcctctgtactccaagagagataccatggacctgcccgaggaactccctggcgtcaagccattcacacggggcccctaccccacaatgtacacattccggccttggacgattaggcagtatgctgggttctctacagtagaggagtccaacaaattctataaggacaacatcaaggccggacagcaaggcctttctgttgccttcgacctcgctacccaccgcggctatgatagcgataatcccagagtgaggggcgacgtgggcatggccggggtggctattgacaccgtggaggatactaagatcctgtttgacggcatccctctggagaagatgagcgtgtctatgaccatgaacggggctgtgattcccgtgctggctaatttcatcgtgaccggagaggagcagggcgtgccaaaggagaagctgacaggaacaattcagaacgacattcttaaggagtttatggtgagaaacacctatatattcccccccgagcccagtatgaagatcatcgctgacatcttcgagtacacagctaagcacatgcctaagtttaacagcatcagtatcagcggctaccacatgcaggaggccggcgccgacgctatcctcgagctggcttacaccctggccgatggcctcgagtactcgagaaccgggctgcaggcgggactgaccatcgatgagttcgcccccaggctcagtttcttctggggaatcggcatgaacttctatatggagatcgccaagatgagggccggaagaagactttgggcccacctcattgagaaaatgttccagcccaagaatagcaagtcactgctgctgagggcacactgccagaccagcggatggagcctgactgaacaggacccctacaacaacatcgttcggaccgcaatcgaagccatggccgcagtgttcggagggacccagtctctccataccaactccttcgacgaagccctcggtctgcctacagttaaaagcgccagaatcgctcggaacacccagatcatcatccaggaggaaagcgggatacccaaggtggctgacccctgggggggttcctacatgatggagtgcctgaccaatgacgtgtacgatgccgcactcaagctgattaatgagatcgaagaaatgggaggaatggctaaggctgtggccgaaggaatcccaaagttgagaatcgaggagtgcgctgccaggaggcaggcccgcatcgacagcggaagcgaagttatcgtgggcgttaataagtatcagctggagaaggaggacgccgtggaggtgctggctatcgacaacacctcagtcagaaaccgccagatcgaaaaactgaaaaaaattaagtcgagccgagatcaggcactcgccgagcgttgcctggccgccctgactgagtgcgccgcctcaggagacggcaacatcctggccctcgccgttgacgccagtagagcccgatgcactgtgggagagattactgacgccctcaagaaggtgtttggagagcacaaagccaacgataggatggtgagcggcgcttacagacaggagttcggcgaatctaaggaaatcacttctgccatcaaaagagttcataagtttatggagagagaggggagaaggccccgcctgcttgttgccaagatgggacaggacggccatgatagaggagccaaggtgatcgccaccggcttcgcagaccttggcttcgacgtcgacattggacccctgttccagaccccaagagaggtggctcaacaggccgtggacgccgatgtccacgccgtgggcgtgtctaccctggccgccggccacaagacactcgtgcccgagctgatcaaggagctgaacagcctcggacggcctgatatactggtgatgtgcggcggggtgatcccccctcaggactacgaatttcttttcgaagtcggagtgagtaacgtgttcggccccggaacgcgcatacctaaggctgctgtgcaggtgctggatgatattgagaaatgtcttgagaagaagcagcagagcgtg

SEQ ID NO: 168 - DNA, 2250 bp, Artificial Sequence
  Codon optimized sequence that encodes an MCM polypeptide with the I671V mutation
atgctgagggccaaaaatcagcttttcctgctcagtccacactatttgagacaggtaaaggaatcttccggctccagactgatccagcagagactgctgcaccagcagcagcctctgcaccccgagtgggccgctctggcaaaaaaacagctgaagggcaagaaccctgaggacctcatatggcacacccccgaggggatctcaatcaagccactgtacagcaagagagacaccatggacctgccagaagaactgcccggcgtgaaacccttcaccagggggccctatcctacaatgtacactttcaggccttggaccataaggcagtatgccggattctccaccgtggaggagagcaataagttctacaaggataacatcaaagccgggcagcagggcctgtccgttgcgttcgacctggccacccatagagggtacgatagtgacaaccccagggtcagaggcgacgtgggcatggccggggtcgcgatagacaccgtggaggacaccaagatcctgtttgacggcatccccctggagaagatgagcgtgtcaatgaccatgaacggcgccgtgatccccgtcctggccaatttcatcgtgaccggggaagagcagggagtgcccaaggaaaagttgacagggaccattcagaacgatatcctgaaggagttcatggtccggaatacctacatcttcccccccgagcctagcatgaagatcatcgccgacatcttcgagtacaccgccaagcatatgcctaagttcaattctatcagcatttccggctaccatatgcaagaagctggagcagacgccatactggagttggcctacaccctggccgatggcctggagtacagccggacgggcttacaggccggactgaccatcgacgagtttgcacccagactgtccttcttctggggcataggcatgaacttctacatggagattgccaagatgcgggccggcagacgtctctgggctcatctcatcgagaaaatgttccagcccaagaacagcaagtccctcctgctgagggcccactgccagaccagcggatggagcctgactgaacaggacccctacaacaacatagtgagaaccgccatcgaggccatggccgcagtgtttggagggacccagagcctgcatactaactccttcgacgaggccctgggcctgcccaccgtgaagtccgctagaatcgccagaaatacacagatcataatccaggaggagtccggcatccctaaggtggccgacccatggggcggctcttacatgatggagtgcctgaccaacgatgtgtacgacgctgctctcaagctcatcaacgaaattgaggaaatggggggaatggctaaggccgtcgccgaagggattcccaagttacgcatcgaggagtgtgccgccagacggcaggccagaatcgacagcggcagcgaggtcatcgtaggtgtgaataagtatcagctggaaaaagaggacgccgtggaggtcttggccatcgataacacaagcgtgcggaaccgccaaatcgagaaacttaaaaagattaagagcagccgggaccaggccctggccgagaggtgcctggcagccctcacagaatgtgctgctagcggtgatggcaatatactggccctggctgtcgacgccagtagggcaaggtgtaccgttggggagatcaccgacgctctgaagaaggttttcggcgagcataaggccaacgataggatggtcagcggagcttatcggcaagagttcggagagagtaaggagatcacgtccgccattaaaagagttcataagttcatggagcgggagggcagacggcctagactgctggtggctaagatgggtcaggatggccacgacaggggagcaaaggtgatcgccacaggattcgccgatctggggtttgacgtggacattggccctctctttcagacgccgagggaggtggcccagcaggcagtagacgccgacgtgcacgccgtgggcgtgtctacactggccgccggtcataagaccctggtgcccgagcttatcaaggagctgaactcactcggcagacctgacattctggtaatgtgtggcggagtgatcccaccccaggactacgagttcctgtttgaggtgggcgtgagcaacgtcttcggccccggaactagaatccccaaggccgcagtccaggtgctggacgacattgagaaatgcctggagaagaagcagcaatccgtg

SEQ ID NO: 169 - DNA, 2250 bp, Artificial Sequence
  Codon optimized sequence that encodes an MCM polypeptide with the I671V mutation
atgctgcgggccaaaaaccagctgttcttgctgtctccccactaccttcgacaggtcaaggaaagctctggcagccgtctcatccagcagagactgctgcaccagcaacagccactccaccccgagtgggccgccctggccaagaagcagctgaagggcaagaacccagaggatctgatctggcacacccccgaaggaatcagcattaaaccactctacagcaagagagacaccatggatcttcccgaggaactccccggcgtgaagcctttcacccggggaccttatcccactatgtacaccttccgaccctggaccattagacagtacgctgggttctccacagtggaggagagtaacaaattttataaggataatatcaaagccggccagcagggcctgtctgtagccttcgatctggctacccatagaggatatgatagtgacaaccccagggtcagaggcgacgtgggcatggccggcgtggccattgacaccgtggaggatactaagattctgttcgacggcattccccttgaaaagatgagcgtgagcatgacgatgaacggggccgtgatccctgtgctggctaacttcattgtgaccggagaggagcagggcgtccctaaagagaaactaacaggaactattcagaacgacatcctgaaagagtttatggtgcggaatacctacattttcccccctgagccttctatgaaaatcattgccgacatattcgagtacaccgccaagcatatgcccaagttcaactctatcagcatttctggctatcacatgcaggaggccggtgccgacgccatcctggagctggcatacaccctggcagatggcctcgagtatagccggaccggcctccaggccggcttgaccatcgacgagtttgccccacggctgtccttcttctggggcatcggaatgaatttctatatggagatcgccaaaatgcgggccggaagaagactgtgggcccacctgatcgagaagatgttccagcccaagaacagcaagagcctcctgctgagagcacattgccagaccagcggatggagcctgaccgagcaggatccctacaataatatcgttaggactgccattgaggccatggctgcagtgttcggcggaacacagtccctgcataccaacagctttgacgaagcactgggcctccccacagtgaaaagcgccaggatcgccagaaacacccagatcatcatccaggaagagagcggcatccccaaagttgctgatccatggggcggctcatatatgatggaatgtctgactaacgacgtgtacgatgctgccctcaaactcatcaacgagattgaggagatggggggcatggccaaggccgttgccgagggcatccccaaacttcgaattgaggagtgcgctgccagaagacaggctagaatcgacagcggctctgaggtgatcgtcggagtcaacaagtaccagcttgagaaggaagatgccgtggaagtattggccatcgacaacacatccgtgagaaataggcagatcgagaaactgaaaaaaatcaagagctctcgcgaccaagcccttgccgagagatgtctggccgccctgaccgaatgtgcagcgagcggcgatggcaacatcctcgccctggccgtggacgcctctagggcccggtgcacagtgggcgagatcaccgacgccctcaagaaggttttcggcgaacacaaggcaaacgacaggatggttagcggggcttaccgccaggagttcggggagtctaaggagataaccagcgccatcaagcgcgtgcacaagttcatggaaagagaaggtagacggccaagactcttggtggccaaaatgggccaggacggtcacgaccggggcgctaaagtgatcgccaccggcttcgccgacctgggattcgacgtggacatcggacccctgtttcagacaccccgagaggtggcacaacaggccgtggatgccgatgttcatgccgtgggagtgagcactctcgccgccggccataagacactcgtcccggaactgattaaggagttaaatagcctgggccggcccgacatcctggtgatgtgcgggggcgtgatccccccccaggactacgagttcctatttgaggtgggagtcagcaacgtgttcggccccggtacccggatccccaaggccgcagtgcaggttctggacgacattgagaaatgcctggagaagaagcagcaaagcgtg

SEQ ID NO: 170 - DNA, 2250 bp, Artificial Sequence
  Codon optimized sequence that encodes an MCM polypeptide with the I671V mutation
atgctcagagccaagaatcagctatttcttctgagcccacattatctgagacaggtgaaggagagcagcggaagcaggttgatacagcagcggctcctgcatcagcagcagcctctgcatcccgagtgggccgcactggcaaagaagcagctgaagggcaagaaccctgaggacttgatctggcacacacccgagggcatctctatcaagcctctctatagcaagagagatacaatggatctgcccgaggagctgcctggggtgaagcctttcactcggggcccctaccccaccatgtacaccttccgcccttggaccattaggcagtacgccggcttctccacagtcgaggagagcaacaagttctataaagataacatcaaggcaggacagcaaggcctgtccgtggcctttgaccttgccacacacaggggctatgacagcgataatcctagagtgcgcggcgacgtaggcatggcaggcgtggcaatagataccgtggaggacacaaagatcctgtttgacggcatccccctggaaaagatgtccgtgagcatgaccatgaacggggcggtgatcccagtgctggccaactttatagtaaccggcgaagagcagggcgtgcccaaggagaagctgactggcacaatccagaatgacatcctgaaggagttcatggtgaggaacacatacatctttccccctgagcccagcatgaagatcatcgcagatattttcgaatacacagcaaagcacatgcccaaattcaacagcatctccatctccggctaccatatgcaggaggccggcgccgacgccattctggagctggcctacaccctcgccgacggtctcgagtactcacgcacaggccttcaggccggcttgacaatcgatgaattcgcccccagattgagctttttctggggcattggcatgaatttttatatggagatagcgaaaatgcgggctggcagaagactatgggcccatctgatcgaaaaaatgttccagcccaagaacagcaagtcccttctgctgagagcacattgccagacctctggatggagcctcaccgagcaggacccttataacaatattgttagaaccgcaattgaagctatggcagctgtgttcggaggcacccagagcctgcacacaaactcttttgatgaggcacttggactgcccactgtgaagagtgccagaatcgctagaaacacacagataatcatccaagaggagagtggcatccctaaggttgcggacccttggggcggcagctacatgatggagtgccttactaacgatgtgtacgatgcagccctgaagctcattaatgagatcgaagagatgggcggcatggcaaaggcagtggcagagggcatccctaaattgagaatcgaagagtgcgccgccagaagacaggcccggatcgactcaggcagtgaagtcatcgtgggggtgaacaagtaccaactcgagaaagaagatgccgtggaagtgctggccatcgataacacctccgttagaaaccgacagatcgaaaagctgaaaaagatcaaaagcagcagagatcaggccttagccgagagatgtttggccgccctcacggagtgtgccgccagcggcgacggcaacatcctggcccttgccgtggacgctagtagggctaggtgcactgtgggcgagattacagatgctctgaaaaaagttttcggagagcacaaggccaacgatcgtatggtgagcggagcgtatcggcaggagtttggcgagtctaaagagatcacctcagctatcaaacgcgtccataagttcatggagcgggaaggcaggaggcctcggctgctggtggcaaagatggggcaagatgggcacgatagaggtgccaaggtgatcgccaccggattcgctgaccttgggttcgacgtagacattgggccactgttccagacacccagagaggtcgcccaacaggctgtggatgccgacgtgcacgcggtgggcgtgagtactctggccgcgggccataagaccctggtgcccgaactgatcaaggaactgaatagcctgggcaggcccgatattctggtgatgtgcggcggggtgatcccccctcaggactatgagttcctttttgaggtgggcgtgtctaacgtgttcggccccggcacccggatccctaaggctgccgtgcaagtgctcgacgacatcgagaaatgcctggaaaagaagcagcagagcgtg

SEQ ID NO: 171 - DNA, 2250 bp, Artificial Sequence
  Codon optimized sequence that encodes an MCM polypeptide with the I671V mutation
atgctgagagcaaagaaccagctgttcttactgagcccccactacctgaggcaggtgaaagagagttcagggtcacgtctgatccagcagagactgctccaccagcagcagcccctgcatcccgagtgggccgccctagctaagaagcagctgaagggcaagaaccccgaggacctgatctggcacactcccgaagggattagcatcaagcccctctacagcaagagagacaccatggacctgcccgaggagctccccggagtgaagccattcacaaggggcccctacccaaccatgtataccttcagaccctggacaatcagacagtacgcgggcttttccactgtggaagaatctaacaagttctacaaagacaatataaaggctggccagcagggactgagcgtggcattcgatcttgccacacaccgcggctacgattctgacaaccccagggttaggggagacgtgggaatggccggcgtggccatcgacaccgtggaggacacaaagatcctgttcgacggaatcccacttgagaagatgtcggtgtccatgaccatgaacggggccgtcatccctgtactggctaacttcatcgtgaccggggaggagcagggcgtgcccaaggagaagctgacaggcaccatacagaacgacatcctgaaggagtttatggtgagaaacacctatatcttccccccagaaccctcaatgaagatcatcgctgacatctttgagtataccgctaagcacatgcctaagttcaatagcatctccatcagcgggtaccacatgcaggaagccggcgccgatgctatcctggaattagcttacaccctggccgacggactcgagtacagcagaaccggactgcaagccggcctgaccatcgacgagttcgctcctaggctgtcctttttctggggcattggcatgaacttctacatggaaattgccaagatgagggccggccgccgcctgtgggcccacctcattgagaaaatgtttcagcccaagaactccaagtccttgttgctgagagcccattgccagacctccgggtggagcctcacagaacaggacccctacaataacattgtgagaaccgccatcgaggccatggccgcagtcttcggcggcacacagtccctgcacactaactcctttgatgaagccctgggcctgcccactgttaagtctgccagaatcgcccgcaacacacaaatcattatccaggaggaatccggcatccccaaggtggccgacccttggggcgggagctatatgatggagtgcctcaccaacgatgtgtatgatgccgcccttaaactgatcaacgaaatagaggagatgggcggcatggccaaagccgtcgccgagggcattcctaagttgagaatcgaggagtgcgccgccaggagacaggctaggatcgacagcggcagcgaggtcatcgtgggtgtgaacaagtaccagctggaaaaggaggacgccgtggaggtgctggccatcgacaacacctctgttaggaacaggcaaattgagaagctgaagaagatcaagtccagcagagaccaggctctggccgagagatgtctggccgcacttaccgaatgtgctgccagcggggacggcaacatactggcgctcgccgtggacgccagccgagctagatgcaccgtgggcgaaattacagacgctttgaaaaaggtgttcggcgagcacaaggccaacgataggatggtcagcggagcctaccgccaggagttcggcgagtctaaggagatcacctcagcgattaagagggtgcacaaatttatggagagagagggacggagacccaggctgctggtggccaagatgggacaggacggccacgatagaggagctaaagtcatcgccacaggattcgccgacctaggcttcgatgtcgacatcggacccctgttccaaaccccccgggaagtggcccagcaggctgtggacgccgatgtgcacgccgtgggagtgtctacactggccgccgggcacaagaccctggtccctgaacttatcaaagagctcaacagcctcggcagacccgatatcctggtcatgtgtggcggcgtcataccaccccaggactatgagttcctgtttgaagtgggcgtgagcaacgtctttggccctggaaccaggatcccaaaggctgcagtgcaggtgcttgacgacatcgagaagtgcctggagaagaagcagcagagcgtg

SEQ ID NO: 172 - DNA, 2250 bp, Artificial Sequence
  Codon optimized sequence that encodes an MCM polypeptide with the I671V mutation
atgctgcgagccaagaaccagttgttcctactgagcccccattaccttcggcaagtcaaggagagcagcggcagcagactgatccagcagagactcctccaccagcagcagcccctgcaccccgagtgggctgccctggccaaaaaacagttaaaaggaaaaaaccctgaggacttgatctggcacacccccgaaggcattagcatcaaacccctgtatagcaagagagacacaatggacctgcccgaggagctccccggcgtgaagccctttaccagaggcccctaccccaccatgtatacgttccggccatggaccatcagacagtacgccggtttttctacagtggaagagagcaacaagttctacaaagacaatattaaagccggccagcagggcctgtcagtcgccttcgatctggccacccaccgtggctacgatagcgacaatcctcgagtgagaggagatgtgggaatggctggagtggctattgacaccgtcgaggacaccaaaattctgttcgacggcatcccactggagaagatgtccgtgtccatgaccatgaacggcgccgttattcccgtactggctaacttcatcgtgacgggcgaggagcaaggggtgcccaaggagaagcttacaggcaccatccagaatgatatcctgaaggagttcatggtgagaaatacatacatcttcccccctgagcccagcatgaagatcattgccgatatcttcgagtacaccgcaaagcacatgcccaaatttaacagcatctccatcagcggataccacatgcaggaggccggcgccgatgctatcctcgagttggcttacacactcgccgacggtttggagtacagtcgcaccgggctgcaggctggtcttaccattgacgagtttgcccctcggctcagcttcttctggggcatcggcatgaatttctacatggagattgccaagatgagagcaggacgaagactttgggcgcacctcatcgaaaagatgttccaacccaagaatagcaaatctctcctgctgagggcccattgtcagacctccggctggtctcttaccgagcaggatccttacaataacattgtcagaacagcaattgaagcaatggccgctgtgttcggcggcactcagagcttgcatactaactctttcgacgaggctctgggcctgcctaccgtgaaaagcgccagaattgctcgaaatacacagatcatcatccaggaggaatccggcattcccaaggtggccgacccctggggaggcagttatatgatggagtgcctgaccaatgacgtgtacgacgccgcactgaaactgattaacgagatagaagaaatggggggcatggccaaagccgtggccgagggcatcccaaagctgagaatcgaggaatgcgccgccaggcggcaggccagaatcgacagcggctccgaagtgattgtgggcgtcaacaagtaccagctggagaaggaggacgccgtggaggttctggccatcgacaacaccagcgtgaggaacaggcagatcgagaagctgaaaaagatcaaaagctcacgcgatcaggccctggccgagaggtgtctggccgccctgacagagtgtgctgcaagcggcgatgggaatatcctggcactggctgtcgacgcttcccgcgcaagatgtaccgtgggcgagatcaccgatgccctgaaaaaggtgttcggcgagcacaaggccaacgaccggatggtgagcggcgcctacagacaggagtttggcgagtccaaggagattacaagcgctattaaaagggtccacaagtttatggagcgagagggaagaaggccaagactgctggtcgctaaaatgggtcaggacggtcacgataggggggccaaggttatcgccaccggcttcgccgatctgggcttcgacgtggacattggccccctgtttcagacccccagagaggtagcccagcaggccgtggatgccgacgtgcatgcagtgggcgttagcaccctggccgcgggccataaaaccctggtccccgagttaattaaagagctgaactctctgggacggcctgacatcctggtgatgtgcggcggcgtgatcccgccccaagactacgagtttctgttcgaggtgggcgtgtctaatgtgtttgggcctggcaccagaatccctaaggcagctgtgcaggtgctggacgacatcgagaagtgcctggagaaaaagcagcagtcagtc

SEQ ID NO: 173 - DNA, 2250 bp, Artificial Sequence
  Codon optimized sequence that encodes an MCM polypeptide with the I671V mutation
atgcttcgagccaagaaccagctgtttcttctgagcccccattatctgagacaggtcaaggagagctcaggcagcagactcatccagcagagactgctacaccaacagcagccgctccaccccgagtgggccgccctggccaaaaagcagctcaagggcaagaatcccgaggatctcatttggcacactcctgagggtatcagcatcaagccgctctacagcaagagagacacgatggatctgccggaggagctgcccggcgtgaagccctttacgaggggcccgtaccccaccatgtacacattcagaccctggaccatcaggcagtacgccggcttctccaccgtcgaggagagtaataaattctacaaagataatatcaaggccggccagcaaggcctcagcgtcgccttcgacctggcaacccatcgcggttacgattcagataatccacgtgtgagaggagacgtaggcatggcaggcgtggccatcgacaccgtggaggacaccaagatcctgttcgacggcattcccctggagaagatgagcgtcagcatgacaatgaatggcgctgtaattcccgtgctcgctaatttcatcgtgacaggcgaggagcagggagtgcccaaagaaaagctgactggcactatccagaacgacatcctgaaagaattcatggtgcgtaacacatacatcttccctcccgaacccagcatgaagatcattgcagacattttcgaatacaccgccaaacatatgcccaagttcaacagcatatctattagcggctaccatatgcaggaagccggggcagatgccatcctggaactggcatacacactggccgacgggctcgagtactccagaaccgggctgcaggccggactaaccatcgatgagtttgctcccagactgagctttttctggggcatcggcatgaacttttacatggagattgccaagatgagggctgggagaagattgtgggcccaccttatcgagaagatgtttcagcccaagaacagcaagtccctgctcctcagagctcattgtcagacgagcggatggtccctcaccgagcaggacccctacaacaacatcgtgaggaccgctattgaggctatggctgccgttttcgggggcacccagtcactgcacacaaactccttcgatgaggccctgggcctgcccaccgtgaagtctgcccggatcgctaggaacactcagattattatccaggaggagagcggaattcccaaggtcgccgacccttggggcggctcttacatgatggaatgtctgaccaatgacgtgtatgacgccgccctgaagctaatcaacgagatcgaagaaatgggcggtatggccaaggccgtggccgagggtatccctaagctgcggatcgaagagtgcgctgctaggagacaggccagaatagacagtgggagcgaggtcatcgtgggcgtgaataagtatcaactcgagaaggaggacgccgtggaagtgctcgccattgacaatacctccgtgagaaaccggcagatcgaaaaactaaagaagatcaagagcagtagggaccaggctctggcagagaggtgcctggccgcgctgaccgagtgcgccgcaagcggcgacgggaacatcctcgcactggccgtggacgccagcagagctcggtgtacagtgggagagatcaccgacgcccttaaaaaggtgtttggcgagcataaggcgaacgatcgcatggttagcggagcttacagacaggagtttggtgagagcaaggagatcacgagtgctatcaagagggtgcacaaattcatggagcgcgagggcaggcgccctagactcctcgtcgccaagatgggtcaggacggtcacgacaggggcgcaaaggtgatcgccaccggctttgccgacctaggcttcgacgtggacattggccccctcttccagacgcccagagaagtggcccagcaagctgtggacgccgatgtgcacgcggtgggagtgagcacactcgccgccggccacaagaccctggtgcccgagctgattaaggagctcaactcactggggagacccgacatcctggtcatgtgcggtggagtgatccccccccaagactatgagtttctcttcgaggtaggcgtgagtaacgtgttcgggcccggcaccagaatccctaaggcggccgtccaggtgctggacgatatcgagaaatgtctggagaagaagcagcagagcgtt

SEQ ID NO: 174 - DNA, 2250 bp, Artificial Sequence
  Codon optimized sequence that encodes an MCM polypeptide with the I671V mutation
atgttaagagccaaaaaccagctgttccttctgagcccccattatctgcggcaggtgaaggaatccagcggctccagactcatccaacagaggctcctacaccagcagcagcccctgcacccggagtgggcagctctggcaaagaagcagctcaagggcaagaaccccgaagatctgatctggcacacccccgaaggaatcagcatcaagcctctctatagcaagagagataccatggatctgcccgaggagctgcccggagtgaagccttttactcggggaccttaccccactatgtacactttccgcccctggaccatcagacagtacgcgggcttctcgaccgtggaagagagtaataagttctataaagacaacatcaaagccggccagcagggtctcagcgtggcgttcgatctggctacacacagagggtacgatagcgacaacccaagggtgaggggggacgtgggcatggcgggggtggccatcgataccgtggaagacaccaagatcctgttcgacggtatccccctagagaaaatgtcagtcagcatgacgatgaacggcgcagtaatccccgtgctcgcaaatttcattgtgaccggcgaggagcagggggtgcctaaggagaagctgaccggcaccatacagaacgatattctgaaggagttcatggtaaggaatacatacatcttccctcctgagcccagcatgaagatcatcgccgacatcttcgagtacactgcgaagcacatgcccaaatttaattccatatccatctcgggctaccacatgcaggaagccggcgccgatgcaatactggaactggcttacaccctggccgacgggctggagtacagcaggaccggcctccaggcgggcctgaccattgacgaatttgcccccagactcagcttcttctggggaatcgggatgaatttttacatggagatcgccaaaatgagagcaggcaggagactgtgggctcacttgatcgagaaaatgtttcagcccaagaacagcaaaagccttctgctcagagcccactgccagactagcggctggtctctgaccgagcaggacccctataacaacatcgtgagaaccgccatcgaggccatggccgccgtgttcggcggaacacagtctctgcataccaactccttcgacgaggcgctgggactgccaacggtcaagagcgcccgcattgcaaggaacacccagataatcatccaggaagagtctggaattcctaaggtggcggacccctggggaggctcttacatgatggaatgcctgacaaatgatgtctatgacgctgcactgaaactgatcaacgagattgaggagatgggtggcatggccaaggccgtggccgagggcatcccaaaactgagaatcgaagagtgtgccgcccggagacaagccaggatcgactccggaagcgaagtgattgtgggagtcaataagtaccaattggaaaaggaggacgccgtggaggtgctagctatcgacaatacctccgtgcgcaacaggcaaatagagaagctgaaaaagatcaagtcatcccgggatcaagccctggctgagaggtgtttggccgccctcacggaatgcgctgccagcggcgacggaaacatcctggccctggccgtcgacgccagcagagccaggtgcaccgtgggtgaaattaccgacgctctgaagaaggtgttcggtgaacacaaagccaacgacagaatggtgagcggtgcctacagacaggagttcggcgagtccaaggagatcacttcggccatcaagagggtgcacaagtttatggagcgggagggcaggaggcccagactcctagtggcaaaaatggggcaggacggccatgataggggggccaaagtgatcgccaccggattcgcagacttgggcttcgacgtggatatcggacccttgtttcagaccccccgcgaagtcgcacagcaggcggtggacgcggatgtgcacgctgttggcgttagcacactggctgccggccataaaaccctggtgcctgagctgattaaggaactgaacagtctcggacggcccgatatccttgtgatgtgcggaggcgttatccctccccaggactacgagttcttgttcgaggtgggcgtgagcaatgtctttggtccaggaactaggattcccaaggctgccgtgcaggtgctggacgacatcgaaaagtgccttgagaagaagcagcagtctgtg

SEQ ID NO: 175 - DNA, 2250 bp, Artificial Sequence
  Codon optimized sequence that encodes an MCM polypeptide with the I671V mutation
atgctgagggctaaaaaccaactgttcctgctgagcccccactacctgcgccaggtgaaagagtctagcggtagcaggctcatccagcagaggctgctgcatcagcagcagcccctccaccccgagtgggctgccctcgccaagaaacagttaaaggggaagaatcccgaggacctgatttggcacaccccggagggcatcagtattaagcctctgtacagcaagagagacaccatggacctgcccgaggaactccctggggtgaagcccttcaccaggggaccctatccgaccatgtacacattcaggccttggaccatcagacagtatgcaggcttcagcaccgtggaagagagcaacaagttctacaaggataatatcaaggccggacagcagggactgagtgtggccttcgatcttgccacccacagaggctatgactctgacaatcccagagttcgtggggacgttgggatggccggagtggccattgatacagtggaggacaccaagatcctgtttgacgggatcccgctggagaaaatgagcgtgtccatgactatgaacggggcagtgatcccagtgctggctaacttcatagtgactggagaggagcagggcgtgccgaaggagaagctcacaggcaccatccagaatgacatcctgaaagaattcatggtgcgtaatacttacatattccccccagagcccagcatgaaaatcatcgcggacatttttgagtacaccgccaagcacatgcccaaatttaactcaattagcattagtggctatcatatgcaggaggccggtgccgacgcaatcctggaactggcttacaccctggctgacggccttgagtatagccggacaggcctgcaggcaggcctgactatcgatgaatttgccccacgcctgtctttcttttggggcatcggcatgaacttttacatggagattgctaagatgcgcgctggcagaagactctgggcccacctgattgagaagatgttccagcccaagaactcaaagtccctgctgctgagggcccactgtcagacttctggatggagcctgaccgagcaggatccctataacaacatcgtgcgtaccgccattgaagccatggctgctgtattcggcggtacccagagcctgcataccaacagcttcgatgaggccctgggcttgcccaccgtgaagtctgcacgtatcgcccggaacacccagatcatcatccaggaggaatccggcatccccaaggtggccgacccctggggaggcagctacatgatggaatgcctcaccaacgacgtgtacgacgccgctctcaagttaatcaatgagatcgaggagatgggcggcatggccaaagctgtggcagagggaatcccaaagctgaggatcgaggagtgcgccgctagaaggcaggcccgcatcgatagcggctcagaggtgatcgtgggcgtgaataagtatcagctggagaaagaagacgccgtggaagtgctggcgatcgacaatacctccgtgcgaaacagacagatcgagaagctgaagaagatcaagtcgagccgcgaccaggccctggccgagagatgtctggcagccctgaccgagtgcgcagccagcggcgacggcaatatcctggccctggccgtggacgcctcccgcgcgaggtgcacggtgggcgagattacggacgctttgaaaaaggtgttcggcgagcacaaggccaatgacaggatggtgtccggggcctatcgacaagaattcggggagagcaaagaaatcacctccgccattaagagagtccacaagttcatggagagagagggccggagacccagacttctggtcgccaagatgggccaagacggccatgataggggcgcaaaggtgatcgccaccggatttgccgacctgggcttcgacgtggatatcggacctcttttccagactcccagagaggtggcccagcaggccgtagacgccgacgtgcatgctgtaggtgtgagcacgctggccgccggccataagaccctggtccccgaactaatcaaggagctgaactccctcggcagacccgacatcctggtgatgtgtggcggcgtgatccccccacaggactatgagttcctgtttgaggtaggcgtgagcaacgttttcggcccaggaaccaggatccctaaggctgccgtgcaggtgctggatgacatcgaaaagtgcctggagaagaagcagcaatcagtt

SEQ ID NO: 176 - DNA, 2250 bp, Artificial Sequence
  Codon optimized sequence that encodes an MCM polypeptide with the I671V mutation
atgcttagagccaagaatcagctcttcctgctgagcccccattatcttagacaggtgaaggagagttcgggctctcggctgatccagcagagactgctgcaccagcagcagccattgcaccccgagtgggccgcgctggcgaagaaacagctgaagggcaagaaccccgaggatctgatctggcacacaccagaaggcatcagcatcaagcccttgtatagcaagcgggacacaatggatctccccgaggagctgcccggcgtaaagcccttcactcgaggcccctaccctacgatgtacaccttcagaccatggactattcggcagtacgctggattctccaccgtggaggaatctaataaattctataaggataatatcaaggccggccagcagggcctgagtgtcgcgttcgacctggccacccataggggatacgactcagacaaccccagggttcggggcgacgtgggcatggccggcgtcgccatcgacaccgtagaggacacaaaaatcctgttcgacggcattcccctggagaaaatgagtgtgagcatgactatgaacggcgcagtgattcccgtgctggccaatttcatagtgacaggggaggaacagggggtccccaaagagaaactcaccggcaccattcaaaacgacattctgaaggaattcatggtgcggaacacatacattttcccccccgaaccaagcatgaagatcattgctgatatcttcgagtacacagcgaagcacatgccaaagttcaactctatttctatctccgggtatcacatgcaggaggcaggagccgatgccatcctggagctggcttacaccctggcagacggcctcgagtactcgcgaaccggactgcaggccggcctcaccatcgatgagtttgcaccccggctcagcttcttctggggcatcggtatgaacttttatatggagatcgctaagatgcgcgcaggtcgtagactttgggcccacctcatcgaaaaaatgtttcaacccaagaattccaaatccttgctgcttagagcccattgccagacatccggctggagtctgaccgagcaggacccctacaacaacattgtgagaacagcgatcgaggcaatggccgccgtgttcggcggaacccagagcctccataccaactcctttgacgaggccctcggactgccaaccgtcaagagcgccaggatcgccagaaacacccagatcatcatccaggaggagagcggcattccaaaagtggccgatccttggggcggctcctacatgatggagtgcctcactaatgatgtgtacgacgccgccctgaagctgattaacgagattgaggagatgggcggaatggctaaggccgtggctgaagggatccccaaattgagaattgaggaatgcgccgctagaaggcaggctcgcatagactcaggctccgaggtcatcgtgggcgtcaataaatatcagctggagaaggaggacgctgtagaggtgctggcaattgataacacctctgtgcggaacagacaaattgaaaaattaaagaaaattaagagcagcagagaccaagccctggccgagcgctgcctggccgccctgaccgagtgcgccgccagtggcgacggaaacattctagcactggctgtggacgcctcgcgtgcgagatgcaccgtgggcgagataacagacgccctgaagaaggtgttcggcgagcacaaggccaacgataggatggtgtctggagcctatagacaggagtttggcgaaagcaaagagatcacaagcgctattaagagagtgcacaagtttatggagagagaaggccgcagacccagactcctggtcgccaagatgggacaggacggtcacgaccggggtgccaaagtaatcgctaccggctttgccgacctgggcttcgacgtcgatattggccctttattccagaccccgcgggaggtagctcagcaagccgtcgacgctgatgtgcacgccgtgggagtgtctaccctggccgccggacacaagacgctggtgcccgagctgatcaaggaactgaatagcctgggcagaccggacatcctggttatgtgcggaggggtgattcccccacaggattacgaattcctcttcgaggtgggggtgtcaaatgtgttcgggcccggaactagaatccccaaggccgccgtgcaggtgctcgacgacatcgaaaagtgtttggagaagaagcagcagagcgtc

SEQ ID NO: 177 - DNA, 2250 bp, Artificial Sequence
  Codon optimized sequence that encodes an MCM polypeptide with the I671V mutation
atgctgagagccaaaaaccaactcttcctgctgagcccacactacctgcgccaggtcaaggagtcaagcggcagcagactgatccagcagagactgctccaccagcagcagcccctgcatcctgagtgggccgctctggccaaaaaacagctgaagggcaagaaccccgaggacctgatctggcacacccccgagggcatcagcatcaaacccctgtattcaaagcgggacacaatggacctccctgaggagctgcctggcgtcaagccattcacgaggggcccataccccaccatgtacacgttcaggccctggaccatccggcagtatgccggattcagtaccgtcgaggagtctaacaagttttacaaggacaacatcaaggcaggacagcagggcctgtctgttgcatttgacctcgccacacaccgaggctacgacagcgataaccccagagtcaggggcgatgtgggcatggccggcgtggccatagacacagtggaggataccaagatcctgttcgatgggatcccactggagaagatgtccgtgagcatgacaatgaatggcgccgtcatccccgtgctggctaatttcattgttaccggagaagagcagggagtgccaaaggagaaactgaccggcaccatccagaatgatatccttaaggaattcatggttaggaacacatacattttcccacccgagccatctatgaagattattgccgacatcttcgaatataccgccaagcacatgccgaaattcaactctatctcaatcagcgggtaccatatgcaagaggccggagccgatgctatcctggaactcgcttacaccctggccgacggcctggagtacagcagaactggcctgcaagctggactgactatcgatgagttcgcgccgcggctgagcttcttctggggcatcggcatgaacttttatatggagattgccaaaatgcgcgccggcaggagactctgggcccacctgatcgagaaaatgttccagcccaaaaacagcaaaagcctgcttctgcgtgcccattgccaaaccagcggctggtctctgactgaacaggacccttacaacaatatcgtgaggaccgccattgaggccatggccgccgtgtttggtggcactcagagcctgcacaccaattctttcgatgaagccctgggcctgcccacagtgaaatccgccagaatcgccagaaacacacagatcatcatccaggaggagagcggcatccccaaagttgctgacccctggggcggctcctacatgatggagtgcctcaccaacgacgtgtacgacgcagctttgaaacttatcaacgagattgaggagatgggaggaatggcgaaggccgtggccgagggtattcccaagctgaggattgaagaatgcgcagccagaagacaggcacggatcgattccggcagtgaagtgattgttggagtgaacaagtaccagctggagaaagaggacgccgtggaagtcctggccatcgataatacaagcgtgagaaacagacagattgaaaagctgaagaagatcaagtctagccgcgatcaggctctggccgagagatgcctggccgccctcaccgaatgcgcagccagcggcgatgggaacatcctcgcactggctgtcgacgcttccagagctagatgcaccgtgggtgagatcacggacgctctgaagaaggtgttcggcgagcacaaggccaacgacaggatggtgagcggtgcataccgtcaggaatttggtgagtccaaggaaattacctccgcaatcaagagagtgcacaaattcatggaaagggaaggtcgaagacctagactgctggtcgccaagatggggcaggacggccatgataggggcgccaaggtcatagctaccgggtttgcggacctgggcttcgacgtggacatcggccctctcttccagaccccccgggaagtggcccagcaagccgtggacgctgacgtgcacgctgtcggagtgtccaccctggctgcaggacacaagaccctggtgcccgagctcattaaagagctgaactctctgggccgccccgacattctcgtgatgtgcggcggcgtgatcccccctcaggattacgagttcttgtttgaagtgggcgtgagcaacgtgttcggccctggcaccagaattcctaaagccgcagtccaggtgctcgatgacatcgagaaatgcctggagaaaaaacagcagagcgtc

SEQ ID NO: 178 - DNA, 2250 bp, Artificial Sequence
  Codon optimized sequence that encodes an MCM polypeptide with the I671V mutation
atgctaagggcgaagaaccagttgttcctcctcagcccacattatctgaggcaggtgaaggagagcagtggatcaaggctgattcagcagaggctgctgcaccagcagcagcccctgcacccagagtgggccgccctggctaagaagcagctgaaaggcaagaaccccgaggatttgatttggcacaccccagagggaatctctatcaagcctctgtacagcaaacgcgacacaatggacctgccagaggagctgccaggcgtgaagcctttcacacgggggccttaccctaccatgtacacattcagaccctggaccatcagacagtacgccggcttctccaccgttgaggagtccaataagttctacaaggacaacattaaagccggacagcagggcctcagcgtggcctttgacctcgccacccacaggggctacgacagcgataacccccgtgtgagaggggacgtgggaatggccggggttgctatcgatactgtggaggacactaagatcctctttgatggcattcccctggaaaagatgagcgtctctatgaccatgaacggggccgtgatccccgtgctggccaactttatcgtgactggcgaggagcagggggtgccaaaagagaagctgacaggaaccattcagaacgacatcctgaaggagtttatggtcaggaacacctacattttcccccctgagccaagcatgaagatcatcgccgatattttcgagtataccgcgaagcacatgcctaaattcaactctatcagcatcagcggctaccacatgcaggaggccggcgcggatgccattctggagctggcctacacactggccgacggcctcgaatacagccggactggcctgcaggctggcttgacaatcgacgagttcgctccaagactgagcttcttctggggcatcgggatgaacttctatatggagatcgctaagatgagagccggaagaagactgtgggctcacctgatagagaagatgtttcagcctaagaattctaagagtctgctgctgagggcgcactgccagactagcggctggtccctgaccgagcaggatccatataacaacatcgtgagaacagctattgaagccatggccgccgtgtttggcggaacacagagcctccacaccaactcttttgacgaggctctgggattgcccaccgtgaagagcgccagaatcgccagaaatacccagatcatcattcaggaggagtcaggcatccccaaggtggctgacccctggggcgggtcttacatgatggagtgtctgaccaacgacgtatacgacgccgccctcaagcttattaatgaaattgaggagatgggtggcatggccaaagctgtggcagagggcatccccaaactgcggatcgaggagtgcgccgccagacggcaagcaaggattgacagcggctctgaagtgatcgtcggcgtcaataagtatcagctggagaaggaggacgccgtggaggtactggccatagacaacacctctgtgcggaaccgccagatcgagaagcttaagaagatcaagagcagtagagatcaggcactggctgaaaggtgcctcgctgctctgactgaatgtgctgcctctggcgatggcaacatcctggcccttgccgtggacgcttcacgggccaggtgcacagtgggagagattaccgacgccctgaagaaagtgttcggtgagcacaaggccaacgaccgtatggtgagcggcgcttaccggcaggagttcggcgaatccaaggagatcaccagtgccatcaagagagtccacaagtttatggaaagagagggccgcaggcctcggctcctggtggctaagatggggcaggatggacacgacaggggcgccaaggtgatcgctactggcttcgccgaccttggctttgacgtggatatcggccccctgttccagacccccagggaggtggcccagcaagcggtggacgcggacgtgcacgctgtgggcgtgagcacactggccgccggccacaagactctggtgcccgagctgatcaaagagcttaactcactcggccgcccagacattctggtaatgtgcggcggagtcatcccaccccaagactatgaattcctgttcgaagtgggagtgagcaatgtgttcggccctggcaccagaatccccaaagctgccgtgcaggtcttggatgacatcgagaaatgcctggagaagaagcagcaaagtgtc

SEQ ID NO: 179 - DNA, 2250 bp, Artificial Sequence
  Codon optimized sequence that encodes an MCM polypeptide with the I671V mutation
atgctgagggccaaaaaccagctgttcctgctcagccctcattacctaagacaggtcaaggagagctccggcagcagactgatccagcagcgattactgcaccagcagcagccgctgcaccccgagtgggccgccctcgccaaaaagcagctgaagggcaagaacccagaggacctcatttggcatacccccgagggcataagcattaagcccctctattctaagagggataccatggacctgcccgaagagctgcccggcgtcaaaccctttaccagggggccttacccgactatgtacacattcagaccctggactatcagacagtacgcagggttctccacggtcgaagagagcaacaagttctacaaggacaacatcaaagccggccagcaagggctcagcgtcgcattcgacctggctacccacaggggctacgactctgacaaccctagagtgagaggggacgtggggatggctggagtcgccatcgacaccgtggaggacaccaagatcctctttgatgggatcccactggagaaaatgtccgtgagcatgaccatgaatggggccgtgatccctgtgttagccaactttatcgtgacaggagaggaacagggggtgcccaaggaaaagttgaccggcaccatccagaacgatatcctgaaagagttcatggttaggaatacctacatcttcccccccgagccctctatgaagatcatcgccgacatatttgaatataccgcgaaacacatgcccaagttcaacagcatttctatcagcggctaccacatgcaggaagccggcgctgatgccatcctggagctcgcctacacactggcggatggcctggagtacagcagaacaggcctccaggctggcctgaccatcgatgagttcgcaccccgcctttccttcttctggggaattggtatgaatttttacatggaaatcgcgaagatgcgcgccggcaggagactgtgggcacatctgatcgagaagatgtttcagcctaagaacagtaaatcgctgctgctgcgggcccattgccagacgtccgggtggtcactgaccgaacaggatccctacaacaacatcgtcagaactgccatcgaggccatggccgccgtgttcgggggaacccaatccctgcacaccaattctttcgacgaggcactgggcctgcccaccgtgaagagcgccagaattgcccggaatacccagattatcatccaggaagaatccggcatccccaaggtcgcggacccctggggcggctcttacatgatggaatgcttaaccaacgacgtatacgacgccgccctgaaacttatcaacgaaatcgaggagatgggcggaatggcaaaggctgtggccgagggaatccccaagctgagaatcgaggagtgcgccgccaggagacaggccagaatagacagcgggtcagaggtaatcgtgggggtgaacaagtatcaactggagaaggaggacgccgtggaggtgctcgctatcgacaacacatccgtgagaaacagacagatcgagaaactgaagaaaattaaaagcagcagagaccaggcactggccgaaagatgcctggcagcactgaccgagtgcgctgctagcggcgacggaaacatcctggcccttgctgtggacgcctcaagggcacgctgcactgtaggcgagatcaccgacgccctcaagaaggtgttcggggagcacaaggcgaatgacagaatggtgagcggtgcctaccgccaggagtttggagagagcaaggaaataaccagcgccattaagagagtgcacaagtttatggagagagagggcaggcggcccaggctgctggtggcaaagatgggccaggacggacacgaccggggcgctaaagttatcgcgacaggctttgctgacctgggattcgatgttgacattggccccctgttccagacaccccgggaggttgcccagcaggccgtggatgccgacgttcacgccgtgggcgtcagcacactggccgccggccataagaccctggtgcccgagctgatcaaggagctgaatagcctgggtcgacccgatatcctggtgatgtgcggcggagtgatccctccccaggattatgaattcttgtttgaggtgggagtgagcaacgtttttggccctggcacccgtatccccaaggccgccgttcaggtactggacgacatcgaaaaatgcttagagaagaagcagcagtcagtg

SEQ ID NO: 180 - DNA, 2250 bp, Artificial Sequence
  Codon optimized sequence that encodes an MCM polypeptide with the I671V mutation
atgctgcgagcgaaaaaccaactgtttctgctgtccccccattacctgcgccaggtgaaggagtccagcggaagccggctcatccaacagcggctgctgcaccagcagcagcccctgcaccccgagtgggccgcactggccaagaaacagctgaaaggcaaaaaccccgaagacctgatctggcacacgcccgaaggcatcagcatcaagcccctctactccaagcgcgataccatggatctgcccgaggagctccccggcgtgaagccctttaccaggggcccctatcccaccatgtacaccttccggccctggaccatcaggcagtacgccggattcagcacagtggaggagagcaacaaattttacaaggacaatatcaaagccgggcagcaaggcctgagcgtcgccttcgacctggcgacacacagggggtacgacagcgacaatccgcgggtcaggggcgacgtcggaatggcaggcgtggccatcgacaccgtggaggacaccaaaatcctgtttgacggcatccccctcgagaagatgagcgtgtccatgaccatgaacggcgcagtgatcccggtgctggccaacttcatcgtcaccggggaggagcagggcgtcccgaaggagaagctgaccggcaccatacaaaacgacatactgaaggaattcatggtgaggaacacgtacatctttccccccgaacccagcatgaagatcatcgcagatattttcgagtataccgccaagcacatgcccaagttcaactccatctcgatcagtgggtaccatatgcaagaagccggggccgacgccatcctggagctcgcctataccctggccgacggcctggagtatagcaggaccggcctccaggccgggctgacgatcgatgagtttgcccccaggctgagcttcttctgggggatcgggatgaatttttatatggagatcgccaagatgagggccgggcggaggctgtgggcccacctgatcgaaaagatgttccagcccaagaactcaaagagcctgctcctgcgggcccattgccagaccagcggctggtccctgaccgagcaggacccctacaacaacatcgtgaggacagccatcgaggcaatggccgccgtgttcgggggcacccagagcctgcataccaactccttcgacgaggcgctggggctcccgaccgtgaaaagcgcccggatcgcacggaatacccagatcatcatccaggaggagagcggcatccccaaggtcgcagacccctggggcggctcctacatgatggagtgtctcaccaacgacgtgtacgacgccgccctgaagctgatcaacgagatcgaggagatgggggggatggccaaggccgtagccgagggcatccccaaactgaggatcgaagagtgcgccgcccgccggcaggcgaggatcgacagcggcagcgaggtgatcgtgggggtgaacaaataccagctggagaaggaggatgccgtcgaggtgctggccattgacaacacctcggtccggaacaggcagatcgagaagctcaagaagatcaagagcagtcgagaccaggccctggccgagaggtgcctggccgccctgacagaatgcgcagccagcggcgacggaaacatcctggcgctggccgtggacgccagtcgggccaggtgcacggtgggcgagatcaccgacgccctgaagaaggtcttcggggagcacaaggccaacgaccggatggtgagcggcgcctaccgacaggagttcggcgagtcaaaggagataacctccgccatcaagagggtgcacaagttcatggagagggagggcaggaggcccaggctcctcgtcgccaagatgggacaggacggccatgacaggggcgccaaggtcatcgccaccggattcgccgacctgggcttcgacgtggacatcgggcccctgtttcagaccccacgggaggtggcccagcaggccgtggacgccgacgtgcacgcggtgggcgtcagcaccctggccgctgggcacaagaccctcgtgcccgaactgatcaaggagctgaactccctggggaggcccgacatcctcgtgatgtgcgggggggtgatccccccccaggactatgaattcctgtttgaggtgggggtgagcaacgtgttcggccccgggactagaatacccaaggccgccgtccaggtgctggatgatatcgagaaatgcctggagaaaaaacagcaaagcgtg

SEQ ID NO: 181 - DNA, 2250 bp, Artificial Sequence
  Codon optimized sequence that encodes an MCM polypeptide with the I671V mutation
atgctgcgggccaagaaccagctgttcctgctgagcccccactacctgcggcaggtgaaggagagcagcggcagccggctgatccagcagaggctgctgcaccagcagcagccgctgcacccggagtgggcggcgctggcgaagaagcagctgaaggggaagaacccggaggacctgatctggcacacgccggaggggatcagcatcaagccgctgtacagcaagagggacacgatggacctgccggaggagctgccgggggtgaagccgttcacgagggggccgtacccgacgatgtacacgttcaggccgtggacgatcaggcagtacgcggggttcagcacggtggaggagagcaacaagttctacaaggacaacatcaaggcggggcagcaggggctgagcgtggcgttcgacctggcgacgcacagggggtacgacagcgacaacccgagggtgaggggggacgtggggatggcgggggtggcgatcgacacggtggaggacacgaagatcctgttcgacgggatcccgctggagaagatgagcgtgagcatgacgatgaacggggcggtgatcccggtgctggcgaacttcatcgtgacgggggaggagcagggggtgccgaaggagaagctgacggggacgatccagaacgacatcctgaaggagttcatggtgaggaacacgtacatcttcccgccggagccgagcatgaagatcatcgcggacatcttcgagtacacggcgaagcacatgccgaagttcaacagcatcagcatcagcgggtaccacatgcaggaggcgggggcggacgcgatcctggagctggcgtacacgctggcggacgggctggagtacagcaggacggggctgcaggcggggctgacgatcgacgagttcgcgccgaggctgagcttcttctgggggatcgggatgaacttctacatggagatcgcgaagatgagggcggggaggaggctgtgggcgcacctgatcgagaagatgttccagccgaagaacagcaagagcctgctgctgagggcgcactgccagacgagcgggtggagcctgacggagcaggacccgtacaacaacatcgtgaggacggcgatcgaggcgatggcggcggtgttcggggggacgcagagcctgcacacgaacagcttcgacgaggcgctggggctgccgacggtgaagagcgcgaggatcgcgaggaacacgcagatcatcatccaggaggagagcgggatcccgaaggtggcggacccgtggggggggagctacatgatggagtgcctgacgaacgacgtgtacgacgcggcgctgaagctgatcaacgagatcgaggagatgggggggatggcgaaggcggtggcggaggggatcccgaagctgaggatcgaggagtgcgcggcgaggaggcaggcgaggatcgacagcgggagcgaggtgatcgtgggggtgaacaagtaccagctggagaaggaggacgcggtggaggtgctggcgatcgacaacacgagcgtgaggaacaggcagatcgagaagctgaagaagatcaagagcagcagggaccaggcgctggcggagaggtgcctggcggcgctgacggagtgcgcggcgagcggggacgggaacatcctggcgctggcggtggacgcgagcagggcgaggtgcacggtgggggagatcacggacgcgctgaagaaggtgttcggggagcacaaggcgaacgacaggatggtgagcggggcgtacaggcaggagttcggggagagcaaggagatcacgagcgcgatcaagagggtgcacaagttcatggagagggaggggaggaggccgaggctgctggtggcgaagatggggcaggacgggcacgacaggggggcgaaggtgatcgcgacggggttcgcggacctggggttcgacgtggacatcgggccgctgttccagacgccgagggaggtggcgcagcaggcggtggacgcggacgtgcacgcggtgggggtgagcacgctggcggcggggcacaagacgctggtgccggagctgatcaaggagctgaacagcctggggaggccggacatcctggtgatgtgcgggggggtgatcccgccgcaggactacgagttcctgttcgaggtgggggtgagcaacgtgttcgggccggggacgaggatcccgaaggcggcggtgcaggtgctggacgacatcgagaagtgcctggagaagaagcagcagagcgtg

SEQ ID NO: 182 - DNA, 2250 bp, Artificial Sequence
  Codon optimized sequence that encodes an MCM polypeptide with the I671V mutation
atgctgcgggccaagaaccagctgttcctgctgagcccccactacctgcggcaggtgaaggagagcagcggcagccggctgatccagcagcgcctcctccaccagcagcagcccctccaccccgagtgggccgccctcgccaagaagcagctcaagggcaagaaccccgaggacctcatctggcacacccccgagggcatctccatcaagcccctctactccaagcgcgacaccatggacctccccgaggagctccccggcgtcaagcccttcacccgcggcccctaccccaccatgtacaccttccgcccctggaccatccgccagtacgccggcttctccaccgtcgaggagtccaacaagttctacaaggacaacatcaaggccggccagcagggcctctccgtcgccttcgacctcgccacccaccgcggctacgactccgacaacccccgcgtccgcggcgacgtcggcatggccggcgtcgccatcgacaccgtcgaggacaccaagatcctcttcgacggcatccccctcgagaagatgtccgtctccatgaccatgaacggcgccgtcatccccgtcctcgccaacttcatcgtcaccggcgaggagcagggcgtccccaaggagaagctcaccggcaccatccagaacgacatcctcaaggagttcatggtccgcaacacctacatcttcccccccgagccctccatgaagatcatcgccgacatcttcgagtacaccgccaagcacatgcccaagttcaactccatctccatctccggctaccacatgcaggaggccggcgccgacgccatcctcgagctcgcctacaccctcgccgacggcctcgagtactcccgcaccggcctccaggccggcctcaccatcgacgagttcgccccccgcctctccttcttctggggcatcggcatgaacttctacatggagatcgccaagatgcgcgccggccgccgcctctgggcccacctcatcgagaagatgttccagcccaagaactccaagtccctcctcctccgcgcccactgccagacctccggctggtccctcaccgagcaggacccctacaacaacatcgtccgcaccgccatcgaggccatggccgccgtcttcggcggcacccagtccctccacaccaactccttcgacgaggccctcggcctccccaccgtcaagtccgcccgcatcgcccgcaacacccagatcatcatccaggaggagtccggcatccccaaggtcgccgacccctggggcggctcctacatgatggagtgcctcaccaacgacgtctacgacgccgccctcaagctcatcaacgagatcgaggagatgggcggcatggccaaggccgtcgccgagggcatccccaagctccgcatcgaggagtgcgccgcccgccgccaggcccgcatcgactccggctccgaggtcatcgtcggcgtcaacaagtaccagctcgagaaggaggacgccgtcgaggtcctcgccatcgacaacacctccgtccgcaaccgccagatcgagaagctcaagaagatcaagtcctcccgcgaccaggccctcgccgagcgctgcctcgccgccctcaccgagtgcgccgcctccggcgacggcaacatcctcgccctcgccgtcgacgcctcccgcgcccgctgcaccgtcggcgagatcaccgacgccctcaagaaggtcttcggcgagcacaaggccaacgaccgcatggtctccggcgcctaccgccaggagttcggcgagtccaaggagatcacctccgccatcaagcgcgtccacaagttcatggagcgcgagggccgccgcccccgcctcctcgtcgccaagatgggccaggacggccacgaccgcggcgccaaggtcatcgccaccggcttcgccgacctcggcttcgacgtcgacatcggccccctcttccagaccccccgcgaggtcgcccagcaggccgtcgacgccgacgtccacgccgtcggcgtctccaccctcgccgccggccacaagaccctcgtccccgagctcatcaaggagctcaactccctcggccgccccgacatcctcgtcatgtgcggcggcgtcatccccccccaggactacgagttcctcttcgaggtcggcgtctccaacgtcttcggccccggcacccgcatccccaaggccgccgtccaggtcctcgacgacatcgagaagtgcctcgagaagaagcagcagtccgtc

SEQ ID NO: 183 - DNA, 2250 bp, Artificial Sequence
  Codon optimized sequence that encodes an MCM polypeptide with the I671V mutation
atgctaagagcaaagaaccagctttttctattgtccccccattatttgagacaagttaaggaaagttcaggctccagacttatccaacagcgacttctccaccagcagcagccactgcatccggaatgggccgccctggcaaagaagcagcttaagggaaagaatcctgaggatttaatctggcacacccctgagggcattagcatcaagcccttgtactcgaagagggatactatggacctgcctgaggagctcccaggcgtgaagccgttcacccgcggcccctacccaaccatgtacactttcaggccctggaccatccgacagtacgccggtttttccacagtggaagaatctaataaattctataaagataacataaaggccggacagcaggggcttagcgtggcattcgatctggccacgcatcgcggatacgacagcgataacccaagagttagaggtgatgtgggtatggccggagttgccattgatactgtcgaagacacaaagattctcttcgatggcatccctctggagaaaatgagtgtgtccatgactatgaacggagccgtgattccagtcctcgctaattttattgtgacgggagaagaacagggggttcccaaggagaaacttacggggaccattcagaacgatatccttaaagaattcatggttcgcaacacatacatcttcccaccagagccttctatgaaaattatcgcagatatattcgagtacacggccaagcacatgcccaaattcaacagcattagtataagcgggtaccacatgcaggaggcgggggcagacgccattttggaactggcatacactttggccgacggcctcgaatactctaggacgggtctgcaggcggggctcaccatcgatgaattcgccccccgtctttcgttcttttggggcataggaatgaacttctacatggagatagctaaaatgcgggccgggaggcgcctgtgggcacatctgatagagaagatgtttcaacccaaaaactctaaatctttgttgctgagggctcattgccaaacctcaggctggtccctgaccgaacaggacccctacaacaatatcgttagaaccgcaatagaggccatggctgcagtcttcgggggaacccagtctctgcacaccaatagcttcgacgaagccctaggccttccaaccgtcaagtctgccaggatcgcacgtaacacgcaaattatcatacaggaagaatctggcatccctaaagtggctgacccttggggggggtcctatatgatggagtgcttgaccaacgacgtttacgatgctgctctaaagctgatcaatgaaatcgaagaaatgggcggcatggccaaagctgtcgccgaaggcatcccaaagttgcgtatagaggagtgcgcggcaagaaggcaggctcggatagattccggatccgaagtgatagtgggcgtcaataagtatcaactcgagaaagaggacgctgtcgaggtgttggccatagacaacacaagcgtgcgcaaccggcagatcgaaaaactaaaaaagattaaatcatcaagggaccaggccctggccgagaggtgtctcgcagccttgaccgaatgcgcagcttcaggggatgggaatatcttggctctcgccgtggacgcatctcgtgctaggtgtacagttggtgaaattacagacgcactcaaaaaggttttcggagagcataaggcaaacgaccggatggtgtcaggagcttacagacaggagtttggggaaagcaaggaaatcacctcagccatcaaacgtgtgcacaagttcatggaaagagagggtcggcggccacggctccttgttgccaagatgggccaagacggccacgaccggggagctaaggtgattgcaaccggatttgcagacctcggctttgatgtcgatattggaccactcttccagactccccgagaggttgcccagcaggctgtggacgccgacgtgcatgcagtgggagtttcaaccctggctgctggacataagactcttgtcccagagctaattaaggagttgaattctctcggcagaccagacattttagtgatgtgtggtggcgtcattcccccccaagactatgagtttctcttcgaagtcggagtctcaaatgtatttggaccaggtactcgcatccccaaagctgctgttcaggttctcgacgatatcgaaaaatgtctagagaaaaaacaacaaagcgtg

SEQ ID NO: 184 - DNA, 2250 bp, Artificial Sequence
  Codon optimized sequence that encodes an MCM polypeptide with the I671V mutation
atgctgagggctaaaaaccaactgttcctgctatccccccattacctgcgacaagtaaaggaatcttctggttcccgccttattcaacaaaggttgctacatcagcagcagcccttacaccctgagtgggccgctctcgctaagaagcagctgaaagggaagaaccccgaagaccttatatggcacacccctgagggaatcagcatcaagccgctgtattctaaaagggataccatggacttgcccgaggagcttcccggagtgaagcctttcactaggggcccctatcctacgatgtatacatttcgcccatggacaattagacagtatgcaggattcagtacagttgaagagtcaaacaaattctataaggacaatataaaggccgggcagcagggactgagcgtggcctttgatctggccacccataggggttacgacagtgacaaccctagggtgcgtggcgacgtaggaatggccggggtggcaatcgataccgttgaggacacgaaaatacttttcgacggaatccccctcgagaaaatgtctgtgtctatgacaatgaacggcgccgtgatccccgttctggcaaattttattgtcacgggagaagagcagggcgtgccaaaggagaaactgacgggaacaattcaaaacgacatccttaaggagttcatggttcgaaacacctacattttccccccagagccaagtatgaagataatagccgacatcttcgagtacacggcaaagcacatgcccaaattcaatagcatctcaatcagtggatatcatatgcaggaagctggtgctgacgctatcctcgagcttgcttacaccctcgcagacggactggaatatagtcggaccgggttgcaagctggtcttactatagacgaatttgctccacggctgtcattcttttgggggattgggatgaatttttacatggagatcgcaaagatgcgcgcaggaagacgcctctgggcccacctaatcgaaaaaatgttccagcctaagaacagcaagagcctcctgctcagagcccactgccagacctccggctggtctcttacagagcaggacccgtacaataacattgtgcgcaccgccatcgaggccatggctgccgtctttggtggcacccaaagcctccatactaatagcttcgatgaggcgctgggactcccaaccgtgaagtccgccaggatagctaggaacacccagatcatcatacaggaagagtctggaatccccaaggttgccgacccctggggcggttcctacatgatggaatgtctcaccaatgatgtgtatgatgccgctctaaaattaataaatgaaatcgaggagatgggcggcatggccaaagctgtcgctgaggggatcccgaaactgagaattgaagaatgcgccgctcgccggcaagctcgcatcgattcagggtccgaagtaatcgttggggtgaacaagtaccagctcgagaaagaggacgctgtggaggtcctcgccatagataatactagtgtgcgaaaccgtcagattgagaagctgaagaagataaaatcctcgcgtgaccaggccttggccgagagatgcttggccgctctcaccgagtgcgccgcaagcggggatggcaatatcctcgccctggctgtggatgcaagcagagctaggtgcacagtaggggaaattactgacgcccttaaaaaagtatttggagagcacaaggcaaatgatcgcatggtctccggagcctatcggcaagagttcggcgaatccaaagagattacgagtgccatcaagcgggtccacaaattcatggagcgagaagggcggcgcccaaggctgctcgtggccaagatgggccaggacggacatgacaggggagctaaggtgatcgctaccggtttcgccgacctggggtttgatgtcgacatcggtcctctgttccagactcctagggaagtcgcacagcaggccgtggatgccgatgttcatgccgtcggagtgtctactctggcggctggccataaaactctggtccccgagctgatcaaggagctgaattctctgggccgcccagacatcctcgttatgtgcgggggggtcatcccacctcaggactacgaattcctcttcgaagtgggagtcagcaacgtgtttgggcccgggacccgtataccaaaggctgccgtgcaggtgctggatgatattgaaaagtgtctggaaaaaaagcagcagtccgtg

SEQ ID NO: 185 - DNA, 2250 bp, Artificial Sequence
  Codon optimized sequence that encodes an MCM polypeptide with the I671V mutation
atgctgagggccaaaaaccaactgtttctgctcagccctcattatctgaggcaggtcaaggaatcatccggtagccgactgatacagcagcgacttctccatcagcaacaaccacttcacccagagtgggccgcccttgcaaagaaacagttaaaaggaaagaaccctgaagatctcatctggcacacacccgagggcatctcaataaagccgctgtactcgaaacgagacaccatggacctgcctgaagaactgccgggggtcaagccctttactagagggccctacccaaccatgtacacatttcgcccttggactattcggcaatacgccggcttcagtacggtagaagagtccaataagttttataaagataatattaaagccggacaacaaggactgtcggtggcattcgacctggctacacatagggggtacgatagtgacaatcctagagtccgcggtgatgtggggatggctggcgtggcaatagacaccgttgaggacacgaaaatcctgttcgatggtatccctttagagaaaatgtccgtttctatgacgatgaacggggctgtgatccccgtcctagccaatttcatcgtcacgggcgaggaacagggggttccaaaagaaaaattgaccggaactatacaaaatgacatactgaaggaattcatggttcgcaacacttacattttccctcctgagccttctatgaagataatagccgacatttttgagtacactgctaagcatatgcctaagttcaacagcatctcaatatcggggtaccacatgcaggaggctggagccgacgcgattctcgaattggcgtacaccctcgcggacggtctggagtactctaggactggcctccaggccggacttactattgatgagtttgccccgagactgtccttcttttggggtataggaatgaacttttacatggagatcgctaaaatgcgcgcgggcagaagactgtgggcccacctgatcgagaaaatgtttcaacccaagaactcaaagagcttgttattgagggcccattgtcaaacctcagggtggtcactgactgaacaggacccatataacaacatcgtccgcactgctatcgaggctatggccgctgtcttcggcgggactcaaagtcttcacacaaactctttcgacgaggctctgggtctacccaccgtgaagagcgcccgtatcgcgcgcaatacccaaatcatcatccaggaagaaagtggtatccccaaggtggcagacccatggggcggcagctacatgatggaatgtctgaccaacgacgtctatgacgccgctctgaaactgattaatgagatcgaggagatgggtggcatggctaaggcggtcgcggaggggatcccaaagttacggatcgaggagtgcgccgcacgacggcaagcccgaatcgattcaggttcagaggtcattgtgggggtgaacaaataccagttagaaaaagaggatgctgtggaagtgctggccatcgacaatacatctgttcgcaaccggcagatagagaaattgaaaaaaattaagtcatctcgagaccaggccttagcagaacggtgcctggctgcactgaccgagtgcgctgcgtctggtgatggaaacatactagcgcttgccgttgacgccagccgtgcacgctgtacagtaggggaaattacagacgcattaaagaaggtatttggggagcacaaggcgaacgaccgcatggtgtccggggcctaccggcaggagttcggagagtcaaaggaaatcacctctgccatcaagcgcgtgcacaagtttatggagagggagggcaggcggcctcgtctccttgtcgctaaaatgggtcaggacggtcatgaccgaggggccaaggttattgcgaccggtttcgcggatctgggcttcgacgtggacatcgggccactctttcagaccccaagggaagtagcccagcaagccgtggacgcagacgtacacgctgtcggagtgagcacactggctgccgggcataagacattggtgcctgaattgataaaagagctgaactcactagggcgacctgatatcctcgttatgtgcggcggcgttattcctccacaggactacgaatttctcttcgaggtcggtgtttccaatgtttttggtcccgggactagaatccctaaggcagctgtccaggttctggacgacatagagaagtgccttgagaagaaacaacagtccgtt

SEQ ID NO: 186 - DNA, 2250 bp, Artificial Sequence
  Codon optimized sequence that encodes an MCM polypeptide with the I671V mutation
atgctaagggcaaaaaaccagcttttcttgctgagcccgcattacctgagacaggtgaaggagagctccgggtctcggctgatccagcagagacttctgcaccagcagcagcctttgcacccagagtgggctgctctggccaaaaaacagctgaagggtaaaaacccagaagatctcatctggcacactccagagggcatatcaatcaaaccactctattcaaagcgagacacaatggacttgccagaagagctcccaggggttaaacctttcaccagaggaccttacccaacgatgtacaccttcaggccttggaccatccgccagtacgcgggcttcagcacagtggaggagagtaacaagttctacaaggataacatcaaggcgggccaacaaggtctctccgtggccttcgaccttgccactcacagagggtatgactccgacaatccccgcgtgaggggagacgtgggaatggcgggggtggcaattgacactgtcgaagacaccaagatcctgtttgacggtatccctttagaaaaaatgtcagtgtccatgacaatgaacggagcagtgatacccgttctcgccaacttcatcgttactggagaggagcagggggttccgaaggaaaagctcaccggcacgatccaaaatgatatcctcaaggaattcatggtccgcaacacatatattttcccaccagaaccaagtatgaaaattatagccgatatcttcgaatacactgcaaagcatatgccgaagtttaacagtatctccatcagcggctaccacatgcaggaggctggggccgacgccatccttgaacttgcctacaccctcgccgatggcctggaatactcccgcaccgggctgcaagccggtctgactatcgacgagttcgcccctcgcttgagtttcttttggggtataggcatgaacttttacatggagatagctaaaatgagggctgggcgccggctctgggcccacctgatagaaaaaatgtttcagccaaagaattccaagtccctcctcctgagggcgcactgccagacctctggatggtctttaaccgagcaagatccatataataacatcgtgaggaccgcgattgaagccatggcagcagtctttggaggcacccagtcactgcacaccaactctttcgacgaggcgcttggattacccaccgtgaagtccgcgagaatagccagaaatacacaaattataattcaagaggagtcggggattcctaaagtggccgacccttggggcgggtcatacatgatggaatgtttaactaatgacgtgtacgatgccgcattaaaactgattaacgagatcgaggaaatgggagggatggcaaaggctgtggccgaggggattccaaaactgcggattgaggagtgtgcggctagacgccaggctaggattgactcaggatcagaggtgatcgtgggggtgaataaataccagctggagaaagaggatgcagttgaagtcttagccattgataacactagtgttagaaatcgccagattgaaaaactgaagaaaatcaaaagctccagagatcaggctctagctgaacggtgcttagcagcactgaccgaatgcgccgccagcggcgacgggaatattctagcgcttgccgtagacgccagcagagcccgctgtactgtaggtgagataactgatgcattgaaaaaagtgttcggtgaacacaaggccaatgatcggatggtcagcggggcctaccggcaagagttcggcgaaagcaaggaaattacgagcgcaataaagcgtgtgcataaatttatggagagagaaggacgccggcccaggctgctggttgctaaaatgggacaggatggccacgacagaggcgcgaaggtaatcgcgaccggatttgcagatcttggcttcgatgtggatattggcccactgtttcagaccccccgagaggtcgctcaacaagcggtggacgccgatgtgcacgctgtgggcgtgtctacgctcgctgccggacataagacacttgttcctgaactcattaaggaacttaattctctgggccgcccagatatccttgtgatgtgcgggggagtgattcctccgcaggactatgagttcctgtttgaggttggtgtatctaacgtctttggccccggcacacggattcctaaagcggcggtgcaggtgcttgatgacatcgagaagtgccttgagaaaaaacagcagtccgtt

SEQ ID NO: 187 - DNA, 2250 bp, Artificial Sequence
  Codon optimized sequence that encodes an MCM polypeptide with the I671V mutation
atgctgagagctaagaaccaactgttcctgctgagccctcactacctgaggcaggtgaaggaaagctccgggtccaggctgatccagcaacggctcctgcaccagcagcagccactccatcccgagtgggccgctctggccaaaaagcagctcaagggcaaaaaccccgaggacttaatttggcacactcctgagggaattagcatcaagcctctgtacagcaagagggacaccatggacctccccgaggagctgcctggggtaaagcccttcactaggggcccctaccccaccatgtacacattcagaccctggactatcagacagtacgccggcttctctactgtcgaagagagcaataagttctacaaagacaacatcaaggcaggccagcagggcctctccgtcgcattcgacctggccacgcacagggggtatgacagcgataaccccagggtgcggggcgacgtaggaatggcgggagtggccattgacaccgtggaggataccaaaatcctcttcgatggcattccactcgagaagatgtctgtgagcatgaccatgaacggggccgtgatccccgttttggctaacttcatcgtcaccggggaggagcagggcgtacccaaggagaagctgacaggcaccatacagaacgacatcctgaaggagttcatggtccggaatacatacatctttcctcccgagccctctatgaagatcattgccgacatcttcgagtacaccgccaagcacatgcccaagtttaactcaatatccattagcggatatcacatgcaggaagcaggggccgacgccattctggagctggcctacacactggctgacggactggagtacagccggaccggcctacaggccggcttgaccatcgacgagttcgcccctaggctctcttttttctgggggatcggcatgaatttctacatggagatcgccaagatgagagcggggcggcgtctgtgggcccacctgatcgagaagatgtttcagccaaaaaactcaaaatcactgctgctccgcgcccactgtcaaacaagcggctggtcccttaccgagcaggacccctacaacaacattgtgcggactgctatcgaggccatggccgccgtgttcggcggaacccagagcctgcataccaactctttcgacgaggcccttggtctgcccaccgtgaagagcgccagaatcgcaagaaacacccagattatcattcaggaggaaagtggcattcccaaggttgccgacccctggggcggcagctacatgatggagtgccttactaatgacgtgtacgacgccgccctgaagctgatcaacgagatcgaggagatgggtggcatggctaaagctgtggctgagggaatccctaagcttcggattgaagagtgcgccgccagaagacaggctagaatcgactccggatccgaggtaatcgtcggggtgaacaagtatcaactggagaaggaggacgcggtggaagtcctcgctatcgacaataccagcgtcaggaaccgccagattgagaagctgaagaagatcaagtcttccagggaccaggcgctggccgaaaggtgcctggccgccctgaccgaatgcgccgccagcggcgacggcaacattctggctctggctgtggacgccagccgtgccaggtgcactgtgggagagatcacagacgctctgaagaaggtgtttggagagcacaaggccaacgacagaatggtgtcaggcgcctataggcaggagtttggcgagtccaaggagatcacaagcgccatcaaaagagtacataagtttatggagcgtgagggaagaagaccacgcctgctggttgccaagatgggccaggatggccacgacagaggggctaaggtgatagccactggcttcgccgatctgggtttcgatgtggatatcggacccctctttcagaccccaagagaggtggctcagcaagccgtggacgcagacgtgcacgccgttggggtaagcaccctggccgccggccacaagaccttggtgcctgagctgatcaaggagctcaattcccttggccgcccagatatcctggtaatgtgtggcggcgtgatcccacctcaagactacgagttcctgtttgaggtgggggtgtccaacgtgttcggccccgggaccagaattcccaaggccgcggtccaggtgctggacgacatcgaaaaatgcctggagaaaaaacagcagagcgtg

SEQ ID NO: 188 - DNA, 2250 bp, Artificial Sequence
  Codon optimized sequence that encodes an MCM polypeptide with the I671V mutation
atgcttagagccaaaaatcagctttttcttctgtccccccactacctccggcaggtcaaagagtctagcggatcacgtctaatccagcagaggctgctccaccagcagcagcccctccaccctgagtgggcagcgttagcgaaaaagcaactgaagggaaagaaccctgaagatctgatatggcatacaccagagggtattagcatcaagcctctgtactcaaagcgcgacactatggatctccccgaggagttacctggagtgaagcccttcacaagaggaccatatcccactatgtacacatttagaccttggactatacgtcagtacgccggttttagcaccgtcgaagaaagtaacaaattttacaaagacaacatcaaggctggacaacagggcctgagtgttgccttcgacctcgctacacaccggggctacgactcagataatccaagggtgcgcggcgatgtgggcatggccggagtggccatcgatacagtcgaggataccaagattctctttgacggcattccacttgagaagatgtccgtcagcatgacgatgaatggtgccgtgattccagtgctcgccaattttatagtgacgggcgaagaacagggtgtgcctaaggaaaaactgaccggcacgattcaaaacgatatcctgaaagagttcatggttaggaatacttatatcttcccacctgaaccaagcatgaagataatcgccgatatttttgaatatactgccaaacatatgcctaagttcaacagtatttcaatttccggatatcacatgcaagaggctggcgcagatgcaatattggagctagcatacaccttagccgacggtttggaatatagtaggaccgggctccaggcagggctgacgatagacgagttcgcaccacggctgtcattcttttggggaattgggatgaacttttacatggagatcgcaaagatgcgggcaggccgtcggctctgggcccacttgattgagaagatgttccaaccaaagaacagcaagtcgcttctcctgagggcacactgccagaccagcggatggtccttaactgagcaagatccgtataataatatcgtgaggacagcgatcgaggccatggccgctgtcttcggtggaactcagagcctgcacactaattcctttgacgaggcactgggtctgcccacagtgaagagcgccagaatcgcccgcaatacgcagatcattatccaagaagagtccggcattcccaaggtagcagacccatggggcggctcatacatgatggaatgtttgacaaacgatgtgtatgatgccgctcttaaactgatcaacgaaattgaagagatgggcgggatggccaaggcagtcgccgagggcatccccaagctgaggattgaggaatgcgcagccagaagacaggcccgtatcgattcaggaagcgaagtgatagtgggcgtcaataaatatcagctggagaaggaggacgccgtcgaagtgctcgctatagacaataccagcgttaggaatagacagatcgaaaagcttaagaaaattaaatcgtccagggaccaggcattagccgaacgatgcctggcggccctgactgaatgcgctgcatccggcgatggcaatatcctcgcactcgcggtggatgcctcacgggccaggtgtaccgtgggagagatcacggacgctcttaagaaagtgtttggcgagcacaaagcgaacgatcgcatggtatccggggcttatcgccaggaattcggagaaagtaaggagatcaccagcgctattaaaagagtgcacaagtttatggagcgtgaaggtcgcaggcctagactgttagtggccaaaatggggcaggatgggcacgatcgtggcgcgaaagttattgccaccggtttcgcagaccttggcttcgatgttgacattgggcccctttttcagacccctcgggaggttgcccaacaggctgtcgatgcggacgtgcacgcggttggcgtgtcaaccctggctgccgggcacaaaacgctggttccagaactgatcaaagagctcaattctctaggtaggcccgacatcctggtgatgtgtggcggggtgattcctcctcaggattacgaattcctctttgaggtgggcgtgtcaaacgtctttggcccaggcacacgaatcccaaaagccgccgtacaagtattagatgatatcgagaaatgcctcgaaaaaaaacaacagtccgtc

SEQ ID NO: 189 - DNA, 2250 bp, Artificial Sequence
  Codon optimized sequence that encodes an MCM polypeptide with the I671V mutation
atgcttcgcgcgaagaatcaactgttcctcctgagtccacattacctgagacaggtgaaggagtctagcggcagcagactgatacagcaaaggcttctgcatcagcaacagccacttcatccagaatgggccgccctagcaaagaaacaattgaaaggcaagaatcctgaagatctcatctggcacactcctgagggcatcagtatcaaaccgctctactcaaaaagggatactatggatttacctgaagaactgcccggagtgaaaccatttactaggggcccatatccaaccatgtatacatttcgtccatggactatcaggcaatacgccggcttctctacagtggaggagtcaaataagttttataaggataatattaaggcagggcagcagggcttgtctgtggcattcgatctggcaacgcaccggggatatgatagtgataaccctagggtgagaggagacgtgggtatggctggggtggctatcgacaccgtagaggacaccaaaattctgtttgatggaatcccattagagaagatgagcgttagcatgacaatgaatggggcagtgatccccgtgctggcaaattttatcgtaaccggcgaagagcagggcgtgcccaaagaaaagttaacgggtactattcagaacgatatcctgaaggaatttatggtcagaaacacttatattttccctccagagccaagcatgaagattattgccgatatcttcgagtacaccgccaagcacatgccaaaattcaacagcatctccatcagtggctaccacatgcaggaagctggcgctgacgccatcctggaattggcctatacgctagcggacggattggaatatagtaggactggacttcaagccggcctcacaattgacgaattcgcgcccagactgagttttttctggggaattggcatgaatttctacatggagatcgctaagatgcgagccggccgacggctctgggctcaccttatcgaaaaaatgttccagcccaagaactctaagtccttactgctgagggcccactgccagacttcgggatggtccctgacagaacaggacccatacaacaacattgtcagaacagctatcgaggcaatggccgccgtgttcggtgggacacagtcactccacacaaactctttcgacgaggctcttggactgccgacagtgaagagtgccaggatagccagaaatacacagattattatccaggaagagtctgggatacctaaggttgcagatccctggggggggtcttatatgatggaatgcctcaccaacgacgtctacgatgcagcattgaagcttatcaatgaaatcgaagaaatgggtggaatggctaaggctgtagccgaaggaattcctaagctcagaatcgaagaatgcgcagctcggcgccaggcccggatagactctggctctgaagtgattgtaggggtcaacaagtaccagctagagaaggaggacgccgtcgaggtattggcaattgacaacaccagcgtccggaatagacagatcgaaaaactcaaaaagatcaaatcctctagggaccaagctctggcagagcgatgtctcgctgccctgacagaatgtgcggccagtggcgatggaaacatcctggctctggccgtcgacgcaagtagagcgagatgcactgtgggggaaatcaccgatgcactgaagaaggtatttggggaacataaagccaacgataggatggtttcaggtgcatatcgacaagagtttggagaaagtaaggaaatcaccagcgctatcaaacgcgtgcataagtttatggagcgcgagggacgtagacctcgcttactggtggcgaagatgggacaggacggacacgacagaggcgctaaagtgatcgccacaggattcgcggatctcggcttcgacgtcgacatcggtccactgttccagactccgcgtgaagttgcgcagcaggctgttgacgctgatgtacatgctgttggggttagcacattagcggcaggacataagacccttgtgcccgagctgataaaagagctcaattcccttggcagaccagacattctggtgatgtgtggtggcgtcatcccacctcaagattacgaatttttatttgaggttggggtgtccaatgtctttgggcccgggactcgcataccgaaagctgccgtgcaggtgctcgacgatatcgagaagtgcctcgagaagaaacagcaaagtgtg

SEQ ID NO: 190 - DNA, 2250 bp, Artificial Sequence
  Codon optimized sequence that encodes an MCM polypeptide with the I671V mutation
atgctgcgagctaagaaccaactttttctgctttctcctcactatcttaggcaagtgaaggaaagttcaggctcacgtctgatccaacagagactgttgcaccagcagcagcctttgcacccggagtgggctgcactggcaaagaaacagctgaaagggaaaaacccagaggacctaatttggcacactcccgaaggaatcagcatcaagcctctctactccaaaagggacacaatggacttgcccgaagaacttcccggcgtgaaacctttcaccagaggcccttaccctacaatgtacactttcagaccctggacgatcaggcagtatgcaggcttctccactgttgaagaaagcaacaaattctataaggacaacataaaagccggacagcaggggctgtccgtggccttcgatctggccacgcatcggggttatgacagcgataaccctagagttaggggagatgttggaatggccggtgtggccattgacactgtggaagatacaaagatactgtttgatgggatccccctcgaaaagatgtcggtctcaatgacaatgaacggggcagttattccagtgcttgcaaacttcattgtgactggagaagagcagggggtccccaaagagaaactgacaggaaccatacagaacgacattctgaaagagttcatggtccggaatacctatatttttccgccagagccgtccatgaaaatcattgcagatatttttgaatacactgccaagcacatgcctaaatttaatagcatcagcatcagtggctaccacatgcaggaagcgggagctgatgccattctagaactcgcgtacaccctcgcagatgggttggaatatagcagaacaggcctccaggcggggctcacaattgatgaatttgcacccaggctgtcgtttttctggggaatcggtatgaacttctatatggaaattgcaaagatgcgcgctggcagaaggctgtgggcacacctcatcgaaaaaatgttccagcctaagaacagcaagagcctgctgctgcgggcgcactgccagacctctggctggagtctgacagagcaggatccttataacaatatcgtgcgtaccgccattgaggctatggccgctgttttcggtggcacgcagtccctccacacaaacagctttgatgaggctctgggccttcctactgtcaaaagcgcaagaatcgcacgcaatacacagataataatccaggaagagtcaggcattccaaaggtggccgacccatgggggggcagctatatgatggagtgccttacaaatgatgtgtacgacgcggcactgaagttaattaatgagattgaagaaatgggggggatggctaaggcagtggcggagggtatacccaagctgagaatcgaagagtgtgccgctcgcagacaagctaggatcgacagcgggagtgaagtcatcgtcggagtaaacaaatatcagcttgagaaggaagatgctgttgaggtgttggcgatcgacaacaccagcgtgcggaatagacagatcgaaaagctgaagaagattaagtctagccgcgaccaggctctggcagagcgctgtctggccgcgctaactgagtgtgcagccagcggggacggaaacattctcgccctggctgtcgacgcaagccgcgcacggtgcacagtaggggaaattaccgacgctctcaagaaagtcttcggtgagcacaaggcaaatgaccggatggtaagcggagcttataggcaggaattcggagaaagcaaggaaatcacttctgctattaagcgtgtgcacaaatttatggaacgcgaagggagacgcccacgcttgcttgtggccaagatgggacaggacggccacgatcggggtgctaaagtcattgcgacagggtttgctgatctcggatttgatgtggatataggcccacttttccagaccccacgagaggtcgctcagcaggcagtggacgccgatgtgcacgctgtgggcgtgtccaccctggccgccggacacaaaactcttgtccccgagcttattaaagagctgaatagtcttgggcggcccgatattcttgttatgtgtggaggggttattcctcctcaggactatgagtttctgttcgaagtcggcgtgtccaatgtatttggccccggaacacgtataccaaaagcggctgtacaggtgttggatgacatcgaaaaatgtctggaaaagaaacagcagagtgtg

SEQ ID NO: 191 - DNA, 2250 bp, Artificial Sequence
  Codon optimized sequence that encodes an MCM polypeptide with the I671V mutation
atgctacgggccaagaatcaattatttttgctttccccacattacctccgccaggtcaaagaaagctccggcagcagacttattcagcaaaggctcctgcaccagcagcagccccttcaccccgaatgggcagcgctagccaagaaacagctaaaggggaagaatccagaagatctgatatggcacaccccagaggggatcagtatcaagcctctatactccaaaagggacactatggacctgcctgaggaattaccaggcgtgaaaccctttacccggggcccttaccccacgatgtacacttttaggccttggactatccgccagtacgcgggattttctacagtcgaagaaagcaacaaattctacaaggataatatcaaggccggacagcaaggcttgagcgttgccttcgatttagcaactcacaggggctatgacagcgacaatcctagggttaggggggacgtgggcatggcaggagtggccatcgacacagtggaagacaccaaaattttgttcgatggaattcctctggaaaaaatgtccgtgagtatgactatgaatggggctgttatccctgtcctggcaaatttcattgtcaccggggaggaacagggcgtacccaaggagaagctgacaggtaccatccaaaacgatatcctgaaggagttcatggtaaggaacacctacatcttccctcccgaaccttccatgaagataatcgccgatatctttgaatacaccgccaagcatatgcctaaattcaattctatttccatctccgggtaccacatgcaagaagcgggagccgatgctattttggagctggcatatacattagcagacggcctcgaatactcacgaacaggtttgcaggcaggtctgactatcgacgagttcgcccccaggctttcatttttttggggcatcggcatgaacttctacatggagatcgctaagatgagggcaggacggagactatgggcccacctgatcgagaagatgttccagcccaagaattctaaaagcctactcctgcgggctcactgtcagacttccggttggtctctgactgagcaggacccgtataataatatcgtaagaacagcaatcgaagctatggcagctgttttcggcggtacacagtctctgcacaccaacagctttgacgaggcgctggggcttccaaccgtaaaaagtgcacggatcgcgcggaacacacagatcattatccaggaagaatccggcattccgaaggtggccgatccttggggtggcagttatatgatggagtgcctaacgaatgatgtttacgacgctgcccttaagctcattaatgaaatcgaggagatgggaggaatggctaaagctgtggcagaggggatcccaaagctccgaatcgaagaatgtgccgctcggagacaggcaaggatcgattccggaagcgaagtcattgtgggggtcaacaagtatcagttagagaaggaagatgctgtggaggtactggctattgacaatacgtctgtgaggaatcggcaaatcgagaaactgaagaagatcaaatcctctcgagaccaagccctggccgaaagatgcctagccgccttaaccgaatgcgcggccagtggggatggcaatattttagccctggctgtggatgcatccagagccagatgcacagtgggtgagatcacggacgcgctcaagaaggtgtttggcgaacataaagccaatgatagaatggtcagcggggcctacaggcaggagtttggcgaaagcaaagagattaccagcgccatcaaacgcgtccacaagtttatggagagggaagggcgacggcctcgcctcttagtggccaaaatgggccaggacggtcacgacagaggcgctaaggtgatcgcgacaggctttgcggacctaggctttgacgtggatattggtccactgttccagacaccccgtgaagtcgcacagcaggctgtggatgctgatgtgcatgcagttggggtttcgactctcgccgcaggtcacaaaaccctggtccccgaattaattaaggaactgaatagcctgggaagacccgatatcctggttatgtgcggcggggttattcctccccaggactacgaattcctttttgaggttggcgtctcaaatgtgttcggcccaggaacgaggattcccaaagctgcagtccaggtgcttgacgatatagagaagtgtctggagaagaaacaacagtccgtg

SEQ ID NO: 192 - DNA, 2250 bp, Artificial Sequence
  Codon optimized sequence that encodes an MCM polypeptide with the I671V mutation
atgctacgggctaagaaccagctcttcctactttcccctcattacctcagacaagtaaaagaaagttcgggatcccgcctgatccagcagcgcctgctgcaccagcagcagcccctccatcctgagtgggccgccttggctaagaagcaactgaaagggaaaaacccagaggatttgatatggcatacgcctgagggcatatctataaaaccactgtactcgaaaagagacactatggacttgcccgaggagctccccggtgttaaacctttcacccgagggccatacccgaccatgtacactttccgtccctggaccattcggcagtacgcagggttcagcacagtagaggagtctaataagttctacaaggacaacattaaagccggtcagcaggggctgagcgtagccttcgacctagcaacgcaccggggctatgactctgataaccctagggtgagaggagacgtaggaatggctggcgtggcaattgacactgtggaagatacaaagatcttatttgacggaattccccttgaaaagatgtctgtttctatgaccatgaacggcgccgtgataccagtactcgcaaatttcatagttaccggagaagaacaaggagttcccaaggagaaactcacgggtacaattcaaaatgacattctgaaagaattcatggttaggaacacttacatcttcccacccgaaccctctatgaagattattgctgatatattcgaatacacagctaaacacatgcctaaatttaattccatctccatcagtggctaccatatgcaggaagcaggcgcagacgccatcttggagctggcttacactctcgctgacgggctcgaatattctcgtacggggcttcaggcagggctcaccattgacgagttcgctccacgtctctcatttttctggggcataggcatgaatttctacatggagatcgctaagatgagggccggcaggaggctctgggcccatctgatagagaaaatgttccagcccaaaaactccaaatcactgcttctgagagctcattgccagactagcggctggagcctgaccgaacaagacccctacaataatattgtaagaactgcgatcgaagccatggccgccgtgtttggcggcactcagtccttgcacaccaattcattcgatgaagccttaggcctgccaactgtgaagtcagcccgcatcgctcggaatacgcagatcatcattcaggaggagagcggaatccccaaagtcgccgatccctggggaggctcctacatgatggaatgtcttacgaatgacgtctatgatgcggccctaaagctaataaacgagattgaagagatgggcgggatggccaaggccgtggctgaaggaattccaaagctcaggatcgaagaatgtgccgcccgccgccaagctagaattgattccggtagtgaggttattgtaggagtcaacaagtatcagctggaaaaggaggatgccgtagaagtgcttgccatagataatacgtccgtgcgaaatcgccaaatcgaaaagttgaagaaaattaagagcagtcgcgaccaggccctcgccgagaggtgcctcgctgctctcacggagtgcgccgcttctggcgacggcaatatcctcgccctggctgtggacgcatccagggctcgttgtaccgtgggtgaaataacggatgccctgaagaaggtgtttggtgagcacaaagccaacgaccgcatggtgagtggcgcctacagacaggagtttggggaatctaaagagatcacctctgctataaaaagagtgcataaatttatggaaagggaaggtaggaggcccaggcttctggtggccaaaatggggcaggacgggcacgaccgcggtgccaaagtcattgccacaggctttgccgacttgggattcgacgtggatattgggccactgtttcagactccacgtgaagttgcgcagcaggccgtcgacgccgatgtgcacgcagtgggagtttccaccctggcagcagggcataaaaccctcgtgcctgaactcattaaggaactaaacagtctgggcagaccagatatcctggtaatgtgtggaggcgtgattcccccccaagattacgagttcttgttcgaggtgggcgtcagtaacgtgttcgggcctggtacgcgaattcccaaagctgcagtgcaagtgctcgacgatattgaaaaatgcctagagaagaagcagcagagcgtg

SEQ ID NO: 193 - DNA, 2250 bp, Artificial Sequence
  Codon optimized sequence that encodes an MCM polypeptide with the I671V mutation
atgttgcgtgccaagaatcagctcttcctgctgtcccctcactacctccggcaggtcaaggagtcttcaggtagtagactcatccagcagagattgctgcaccagcaacaacctttacaccccgaatgggcagcgctagcaaagaaacaactcaagggaaaaaaccctgaggacttaatttggcatacgcccgaggggatttcgatcaaacctttatacagcaaacgcgatactatggacttgcctgaggaactgcccggcgtgaagccctttaccaggggtccctaccccactatgtatacatttcggccttggactattcggcagtacgctggatttagcaccgtcgaggaaagtaacaagttttacaaggacaacatcaaggcaggtcagcagggactcagcgtcgcattcgacttagcaactcaccgcggttatgatagtgataatcctcgagtgcgaggcgatgtgggaatggcgggagtggctatcgacaccgtcgaggacaccaagatcctgtttgacggtatcccactggagaagatgtccgttagcatgactatgaacggcgccgtcattccagtgctggcaaattttatcgttactggagaggagcagggggtgccgaaagagaagttgaccggtactattcaaaatgacatcttaaaggagttcatggtccggaatacatacatctttccccccgagccatcgatgaagatcatcgccgacatttttgagtacacggcaaaacacatgcctaagtttaacagtatatccatttccggttatcatatgcaggaggccggcgctgacgcaatcctggaattggcctatacattagcagatggcctggaatatagtcggaccggcttgcaagcgggcctaaccatcgacgagtttgctccaaggctcagtttcttttgggggattgggatgaacttttatatggaaattgccaagatgcgagctggtagacggctgtgggctcatttaattgagaagatgtttcagcccaagaattctaagtcccttctcctgcgggcccactgtcagaccagtgggtggtctctcacggaacaggacccttataataacattgttcggacagcgattgaagccatggctgcagtttttggcggaactcagtctctgcacaccaattccttcgatgaagctctcggactcccgaccgtcaagtctgcccggatcgcccgcaacacgcaaatcatcattcaggaagagagcggaatcccgaaggtcgccgacccgtggggcggaagttacatgatggaatgtctgaccaacgatgtgtatgatgcggctcttaaactgatcaacgaaatcgaggagatgggcggcatggctaaggccgtcgcagagggcattcctaagctgcgtatcgaggaatgtgctgctagacgccaggcacggatcgacagcggctccgaggtgatagtgggtgtgaacaaatatcaactcgagaaggaggacgccgttgaagtactggctatcgacaacacaagcgtacgtaatagacagatcgagaagctgaagaagatcaagtctagtcgcgaccaggccctggctgaaagatgtctagctgccctaacagagtgcgctgcatccggcgatggcaatatacttgccttggccgttgatgctagtagggccagatgtactgtgggtgagattactgacgcccttaaaaaagtctttggggagcacaaagcaaacgaccgtatggtatcaggtgcttaccggcaagaatttggggaaagcaaagaaattacctctgctatcaagagggtgcacaagttcatggagcgtgaaggaagacgtccccgcctgcttgtcgctaaaatgggccaggatggtcatgatagaggcgccaaagtgattgcgaccggctttgccgatttggggttcgatgtggacataggcccactattccagacccctagagaagtcgcccagcaggctgtcgatgctgacgtccacgctgtgggggtgagcacccttgccgccggacataaaactctggtgcctgagcttattaaagaactcaatagcctgggccgccctgatatcctagtcatgtgtggcggagttatacctccgcaggactacgagttcctgtttgaggtcggggtgtctaacgtctttgggccgggaacccgcatcccaaaagctgcggtgcaggttctggacgacattgagaaatgcctggagaagaaacaacagtcggtt

SEQ ID NO: 194 - DNA, 2250 bp, Artificial Sequence
  Codon optimized sequence that encodes an MCM polypeptide with the I671V mutation
atgcttcgggcgaagaatcagctttttctactctcccctcattacctccgacaggtgaaagagagcagtggatcaagactcattcaacaacgtctgcttcatcagcagcagcctttacatcccgaatgggctgctctggccaagaagcagctgaaaggaaaaaatccggaggacttaatctggcacacacccgagggaatctcaattaagcccctgtattctaagcgagacactatggatctccctgaagagctgccaggggtgaaaccttttacacgcggaccctaccccacaatgtacacatttcggccatggacgattcggcaatacgcagggtttagcacggtggaagaatcaaataagttctacaaggacaatattaaggcaggccaacagggccttagcgtcgctttcgatctcgccacccacagagggtacgattcagacaatcctagggtcaggggagatgtagggatggccggagttgcgatagacaccgtcgaggacaccaagatcctgtttgatgggatcccgctggaaaagatgagcgtgtctatgacaatgaatggagctgtgattcctgtgttggccaattttattgtgacaggcgaggagcagggagtgcctaaggagaagctgactggtacgatccagaacgatattctcaaagaatttatggtgcggaacacgtacattttcccacccgaacctagcatgaaaatcatcgccgatatattcgagtatacagcaaaacatatgcccaaattcaattccatatctatcagcggttatcacatgcaggaggcgggtgccgacgcaatcctggagctggcttacaccttggctgacggcctcgaatatagcaggacaggccttcaagcagggctcacgattgatgagttcgcgcctcgattgtccttcttctgggggattggcatgaatttttatatggaaattgcaaagatgcgggcaggacgacgactctgggcacacctaatagagaaaatgtttcaacctaaaaatagcaagagcctgctgttacgcgcccattgccagactagcgggtggtccctgactgaacaagacccgtataacaacatagtgagaactgcaatcgaagccatggccgccgtgttcggagggacccagagtctgcacacgaatagttttgacgaggccctgggcctgccgaccgttaaatccgcgcggatagccaggaatacccagatcatcattcaagaagaatctgggatccctaaagtcgccgatccctgggggggcagttacatgatggagtgcctcactaatgacgtgtacgatgccgcattgaagctgattaacgagatcgaagaaatgggcgggatggccaaggccgtagcagaaggcatccccaaattgcggattgaagaatgtgctgcgcgtagacaggcgcgtatcgattctggatcagaagtaatcgtgggggtgaacaagtaccagctcgagaaagaagacgctgtcgaagtcctggctatcgacaatacttcagtcaggaaccggcagatcgagaagctgaaaaagattaaatccagtcgcgaccaagccctggcggagcggtgtcttgctgcactgacggagtgcgctgcgagcggtgatggcaatatcctggccctggcagtggatgctagtcgcgccaggtgcacagtgggggagattaccgacgctctcaaaaaggtcttcggtgaacacaaagccaacgacagaatggtgagcggcgcttaccggcaggaattcggtgagtctaaagagataactagcgctatcaaacgcgtccacaaattcatggagcgagagggcagaagacctaggctgctggtggcgaaaatgggtcaagacggacacgataggggggctaaggtcatagcaaccggtttcgctgatcttggatttgatgttgacataggtcctcttttccaaaccccgcgtgaggtggctcagcaggctgtggatgcggatgtccatgctgttggggtctcaacactggccgctggccacaaaacacttgttcctgaactgataaaggagctgaacagcctgggtcgtccagatattctggttatgtgcgggggcgttatccctccccaagactatgagttcctgttcgaggtcggcgtaagtaatgtgtttgggcccgggacccgtatccctaaagccgcagtgcaagtgcttgatgacattgagaagtgcttagagaagaaacagcaatcggtg

SEQ ID NO: 195 - DNA, 2250 bp, Artificial Sequence
  Codon optimized sequence that encodes an MCM polypeptide with the I671V mutation
atgctgagagccaaaaaccagctgttcctcctcagcccgcactacctaaggcaggtaaaggagagcagcggatcaagactcatccagcagaggctgctgcaccagcagcaaccgctgcaccccgagtgggccgcactcgccaagaagcagctgaaaggcaagaacccggaggacctaatctggcacacccccgaagggatcagcatcaagccgctatactccaaaagagacacaatggacctacccgaggagctccccggagtgaaaccattcacccgcgggccctaccccacgatgtacacgttccggccctggaccatcaggcaatacgccggcttctcaaccgtggaggagagtaacaaattctacaaagacaacatcaaagcgggacagcagggcctctcagtggccttcgacctcgcaacacaccgcggctacgactcagacaaccccagggtgcgcggggacgtcggaatggccggagtcgccatcgacacagtcgaggacaccaagatcctgttcgacgggatccccctggagaaaatgagcgtgagcatgaccatgaacggggccgtgataccagtgctggccaacttcatcgtaacaggagaggagcagggggtgcccaaagagaagctcacagggacaatccagaacgacatcctgaaggagttcatggtacgaaacacctacatcttcccccccgagcccagtatgaagataatcgcggacatattcgagtacaccgccaagcacatgccgaagttcaactcgatcagcatctcaggctaccacatgcaagaggcaggggcggacgcaatcctggaactggcctacacactagccgacgggctggagtacagccgaaccgggctgcaggcgggcctcaccatagacgaattcgccccacggctgagcttcttctgggggatcgggatgaacttctacatggaaatcgccaagatgagagcaggcaggcgactgtgggcccacctaatcgaaaagatgttccaaccaaagaactccaaaagcctgctcctccgggcacactgccaaacaagtggatggagtctgaccgaacaggacccatacaacaacatcgtgcggacagccatagaggccatggccgcggtgttcgggggcacccagagcctccacaccaacagtttcgacgaagccctggggctaccaaccgtcaaatcggcccggatcgcaagaaacacacagatcatcatccaggaggagtcggggatcccaaaagtggcggacccatggggcgggagctacatgatggaatgcctgaccaacgacgtctacgacgccgccctaaaactgatcaacgaaatagaagaaatgggcgggatggccaaggccgtggccgagggcatcccgaagctccgcatcgaggagtgcgcagcgcgacggcaggcgaggatcgactcaggaagcgaggtcatagtaggcgtcaacaaataccagctcgaaaaagaggacgcagtggaagtgctggcaatcgacaacacctccgtccgcaacaggcagatcgagaaactcaaaaagatcaagagctcacgggaccaggccctcgccgagagatgcctcgcggccctaaccgaatgcgcagccagtggcgacggcaacatcctggccctagcagtcgacgccagcagggccaggtgcaccgtgggggaaatcaccgacgcgctgaagaaggtgttcggagagcacaaggccaacgaccgcatggtgagcggggcctacaggcaggagttcggcgaaagcaaggagatcaccagtgcaataaagagggtccacaagttcatggaacgagaaggccgccggccaagactgctggtggcgaaaatgggccaggacgggcacgaccgaggcgcaaaggtaatcgcaacggggttcgccgacctggggttcgacgtcgacatcggacccctgttccaaacccccagggaagtggcccagcaggcagtggacgccgacgtgcacgccgtgggcgtatcgaccctggccgcgggccacaaaacgctggtcccggagctcatcaaggagctgaacagtctgggccgcccagacatcctggtcatgtgcggcggggtgatacccccgcaggactacgagttcctattcgaggtcggagtctcgaacgtgttcgggcccggcacacgcatcccaaaagccgcagtccaggtcctggacgacatcgaaaagtgcctggaaaagaaacagcagtcagtc

SEQ ID NO: 196 - DNA, 2250 bp, Artificial Sequence
  Codon optimized sequence that encodes an MCM polypeptide with the I671V mutation
atgcttcgggcaaaaaatcaactcttcctgcttagtccacactacctacgacaggtaaaagagagctctggttcccggttaatccagcagagactgctccatcagcaacagcccctgcaccccgaatgggcggctctcgctaagaagcaattaaagggcaagaacccagaagacctgatttggcatacaccggaaggaatcagtatcaaacccctctatagcaaaagagatacgatggatctccccgaggaactgcccggagtgaagcccttcacgcgcggtccatacccaactatgtatacgtttcggccctggacgatccggcagtacgccggcttttctaccgtcgaggagtctaataaattttacaaggacaatatcaaggctggccaacagggcttgtcggtagcctttgatctggccactcaccgtggatatgacagcgataatccacgggtgcggggggacgtcggtatggccggtgtagccatcgacaccgtagaagataccaaaatcctctttgatgggatccccctcgagaagatgtccgtgtcaatgaccatgaacggtgctgtgatccctgtgctcgccaacttcatagttaccggggaagagcagggggtgcctaaggaaaagttaaccgggacaatccaaaatgacatcctcaaggagtttatggtgcggaatacttatatattcccacccgagccttcaatgaagatcatcgctgatatcttcgagtacactgctaaacacatgcccaagtttaattctattagtatctcagggtaccacatgcaggaggctggtgcagacgccattctggagttggcttacacactggcggacggtctcgagtattctaggacgggactccaggccggacttaccatcgacgagtttgcccctaggctgtcattcttttggggtatcgggatgaatttttacatggaaatcgctaaaatgcgggccgggcgccggttatgggcccaccttattgagaaaatgtttcagcccaaaaattctaagtctctgctcctaagggcacattgccaaacttcgggctggtcgcttaccgaacaggacccatacaacaacattgtccgcaccgcaatcgaggccatggctgctgtgtttgggggtactcagtctctacacaccaactccttcgatgaagcactcggtctgccgactgtgaaaagcgccagaatcgcccggaatacccaaataataatccaggaggagtccgggattcctaaagtcgcagatccttgggggggctcttatatgatggagtgcctgaccaatgacgtgtacgacgccgccctgaagctaatcaatgagatcgaggaaatgggagggatggccaaagcagtggctgagggaattcctaagctgaggattgaagagtgtgcagctcggcgacaagcgcggatcgacagtggcagcgaggtcatcgtcggagtgaacaagtatcagttagaaaaagaggatgctgtggaggtgcttgctattgataacacatcggtccgcaatagacaaatcgagaagctgaagaaaattaagagcagtcgcgaccaggcattggccgagaggtgcctcgccgccctgacagagtgtgccgcaagtggagatggaaacatacttgctctggccgttgatgcttccagagcccgctgcactgtaggagagattaccgatgcgttgaagaaggtgtttggagaacataaagccaatgaccgaatggtgtcaggagcttaccgccaggaattcggggagagtaaagaaataacaagcgcaatcaagcgcgtgcacaaattcatggaaagagaggggcggagacctcgactattggtggcgaagatgggccaagacgggcacgatcggggggccaaagtgattgctacgggattcgctgaccttggcttcgatgtggatattggccccttgttccaaacgccaagagaggttgcccaacaggccgtggacgccgacgtgcacgcagtgggcgtgtccaccctggccgcaggccataagacactcgttccggaactaattaaagaattgaattccctgggcagacccgacatactggtaatgtgtggcggagttatccccccgcaggactacgagttcttgtttgaagtgggtgtgtccaatgtgttcgggcctggtacccgaatcccgaaagcggccgtacaggttctggacgatatcgaaaaatgcttggaaaaaaagcaacagagcgta

SEQ ID NO: 197 - DNA, 2250 bp, Artificial Sequence
  Codon optimized sequence that encodes an MCM polypeptide with the I671V mutation
atgctccgggccaaaaaccagctgtttttgctgagcccccactacctgcggcaagtcaaggaatcttcaggttctcgcctgatacagcaacgtctgctgcaccaacagcagcccctgcatccagagtgggcagccctggcaaagaaacagctgaagggaaaaaatcccgaggatcttatctggcatacaccagaagggatctcgatcaaaccactgtacagtaagcgggataccatggacttaccggaggagctgcccggtgtcaagccatttactcgaggcccgtatcccaccatgtatacttttcggccatggacaatacgtcagtatgccggatttagcacagtggaagaaagtaacaaattttacaaagataacataaaggctggccagcaaggcctctccgtagctttcgatctggctacgcataggggttatgatagtgacaatcctagggtgcggggggatgtcggtatggctggcgtggcaattgacaccgttgaggacaccaagatcctctttgatgggattcccttggaaaaaatgagtgttagcatgacaatgaatggagctgttatccccgtgcttgccaattttatagtcaccggggaggagcaaggggttcctaaagagaagctaacagggaccattcagaatgacatcttgaaagaatttatggtgaggaatacatacatcttccccccagaaccgtccatgaagatcatcgccgatatcttcgaatatacagcaaaacatatgccgaaattcaattctatttccatcagcggctatcacatgcaggaggctggagcagacgccatcttggagttggcctacacattggctgacggccttgagtactctaggacaggcctgcaggcaggtcttacaattgacgagttcgcccctcgccttagttttttttgggggatcggcatgaacttttatatggagattgccaaaatgagagcgggaagaaggctttgggcccacctaatcgagaagatgtttcagcccaaaaattctaagtctctgctgctgcgcgctcactgtcagaccagtggctggtccctaacggagcaagatccatataacaacatagttcgtactgccatagaagccatggccgcagtattcggaggaacgcaaagcttgcacaccaattcattcgacgaagctctaggcctgccgacagtgaagtcagcccggattgctcgtaacacgcagatcatcatccaagaagaatccggaatcccaaaagtggcggatccttggggtggatcctacatgatggagtgcttgaccaacgatgtgtatgacgctgccctgaagctaatcaatgagatagaggagatgggggggatggccaaagccgtagcagaagggattccaaaactccgcatcgaggagtgcgctgcgaggcgacaggcccggatagatagtggatccgaggtcattgtgggagtcaacaagtaccagctcgagaaggaggacgcagtggaagtccttgccatagacaatacctctgtccgaaatcggcagatcgaaaaactcaagaaaataaaatcttcaagggaccaggctctcgccgagcgttgcctcgcggcactgaccgagtgcgcagcaagcggcgacgggaacatcctcgctcttgctgtggatgcctcccgggcccgatgcactgtcggagagatcactgacgcactgaaaaaggtttttggggagcataaggcgaacgaccgcatggtgtccggggcctacagacaggagtttggtgaatccaaagaaattacaagcgcaataaaacgggtccacaagtttatggagagggagggtcgtcgccctaggctcttggtggctaagatggggcaggatgggcatgaccggggggctaaggtgatcgctactgggttcgcggacttgggatttgacgtggacattggacctctgttccagaccccacgcgaggtcgcgcagcaagccgtggatgcggatgtccacgctgtcggcgtgtccacactggctgccggccataagactttagtgcccgaattgatcaaggagttgaactcactcggaaggcccgatatcctggtgatgtgcggcggtgtcatcccaccacaggactatgaatttctgtttgaggtgggggtctccaacgtattcgggccgggaacaagaattccgaaagcagcggtgcaagtgctcgacgatatcgaaaagtgtcttgaaaaaaagcagcagtcggtc

SEQ ID NO: 198 - DNA, 2250 bp, Artificial Sequence
  Codon optimized sequence that encodes an MCM polypeptide with the I671V mutation
atgttgcgcgcaaagaaccagctatttcttttaagtccacactatctgcgtcaggtgaaggagagttctgggagtagacttatccaacagagactcttacaccagcaacagccccttcatccagaatgggctgcactggctaaaaagcagctgaaaggaaaaaatccggaggacctcatctggcacacacctgaagggataagcattaagccactctacagcaagagggacacgatggatctcccagaggagcttccaggggtaaaaccgtttacacgcggaccctacccaaccatgtacacgttccgaccatggacaatcagacaatacgccggttttagcactgtggaggagtcaaacaagttctataaagataatatcaaagccggacaacagggactttccgtggcctttgacctggccacacaccggggctacgactctgacaacccaagagtccggggcgacgttggcatggccggtgtggccatcgacactgtcgaggacaccaagatcctgttcgatggcattcccttggaaaaaatgagcgtgtctatgaccatgaacggggcagtaatacccgtccttgcaaacttcatcgtgaccggggaagagcagggcgttcctaaggaaaaactgacggggacaattcagaacgacatcctgaaggaatttatggtgcgaaatacgtacatattcccccctgagccgtccatgaagataattgccgacattttcgaatacactgcaaagcacatgcccaaatttaactccataagcatcagtggctatcacatgcaagaggccggggcagatgctatcttggaacttgcctacactctcgcagatggattagagtactccagaacaggtctgcaggctggcctgacaatcgacgaattcgcccccagactatcttttttttggggtatagggatgaatttctatatggagattgccaagatgagagctggaagacgtctctgggcccacctaatcgaaaaaatgttccagcccaagaatagcaagagtctgctcctccgcgctcactgccagacatcgggctggtctctgactgaacaggatccttataataacatcgtcaggactgccatcgaggccatggccgccgtgtttggagggacccagtccttgcacactaacagcttcgacgaggctttgggtctgcctacggttaagtccgcccgcatagctcggaacactcagatcatcatccaggaggaatcaggaattcctaaggttgccgacccatggggcggaagttatatgatggaatgtctcacaaatgatgtttatgacgctgctctgaagctgattaatgagatagaggagatgggtgggatggcaaaagctgtggctgagggaatccctaagctcagaatcgaggaatgtgcagccagacggcaggcaagaatcgattccggctccgaagtgatagtgggggttaataagtatcagcttgagaaggaggatgcagtggaggtgctggcgatagacaatacctcggtaagaaataggcagatagaaaaactcaagaagatcaagtcatctcgcgatcaggccctggccgaacgttgcctggcagcactcaccgagtgtgccgcatcaggggacggaaacatcctcgcattagcggtcgatgcaagtagagcgcggtgtacagtcggcgaaatcactgacgcgttgaaaaaggtcttcggggagcataaggctaacgaccgcatggtgagcggcgcttaccgccaagaattcggagagtctaaagagattaccagcgccattaaacgggttcataaatttatggaacgggaaggacgacgccctcggttgctggtggcaaagatgggacaggacggccacgacagaggcgcgaaagtcattgctacaggtttcgcagacctcgggttcgatgtggacataggccctctttttcagactccacgtgaggtggcacaacaggccgtcgatgcagacgtccatgccgtaggggtgtcaaccctggctgctggacacaagacccttgtaccagagctgatcaaggagttgaacagcttagggcgtcctgatattctcgtgatgtgtgggggagtgatcccaccgcaagattacgagttcctgttcgaggtgggcgtgagcaatgtgttcgggcctggcaccagaataccgaaggcagcggtccaggtcttggacgacatcgagaagtgcctcgaaaaaaaacagcaaagcgtg

SEQ ID NO: 199 - DNA, 2250 bp, Artificial Sequence
  Codon optimized sequence that encodes an MCM polypeptide with the I671V mutation
atgctgagagccaaaaaccagctctttctgttgtccccccactatctgcggcaagttaaggagagttccggctcacgcctgatacaacagagactgctccatcagcaacagccgctgcacccagaatgggcagccctggccaaaaaacaacttaaaggtaagaacccggaggatttgatctggcacacacccgaaggaatttccatcaagcctctatattctaaaagagatacgatggatctgccagaggagttaccgggggtgaagccgtttacacgcgggccctatcctacgatgtacacgttcaggccctggaccatcaggcagtacgcaggtttcagcacagttgaggagagcaacaagttttacaaggacaatattaaggccggccagcaaggcctttcggtagccttcgaccttgcaacacatagggggtatgattccgacaaccctagggtcaggggcgatgttggaatggccggagtcgcgatagacacagtggaagacacgaagatcctgtttgatgggatccctctggagaaaatgagtgtctccatgaccatgaacggcgcggtgatccctgttctggccaatttcattgtgaccggtgaggaacagggggtccctaaggagaaattgacgggcactattcagaacgacatcctcaaagaatttatggttcgcaacacctacattttccctcccgagcccagcatgaaaattatcgcagatatctttgaatatactgcaaagcacatgcctaagtttaattctatcagcattagtggctaccatatgcaggaggccggagccgacgccattctcgagctggcatataccttagccgatgggctagagtattcgcgaacaggtctgcaggcaggacttacaatcgacgaatttgccccacgcttgagctttttttggggtatcggcatgaacttctacatggagattgcgaagatgcgagcaggaaggagactgtgggcccacctcattgagaagatgtttcagcctaaaaactctaagtcattactcctgcgggctcattgtcagaccagtggctggagccttaccgagcaggacccgtacaataatattgttcgcacagctattgaggcgatggccgccgtgttcgggggcacgcagtcccttcacacgaactcattcgatgaagcactgggcctgcccaccgtcaagtctgctcgaattgcccggaatacacagataattatacaggaggaatctggcatcccaaaggtggctgacccgtgggggggtagctatatgatggaatgcctgactaatgacgtgtacgatgctgcgttgaaactgataaatgagattgaggagatgggtggcatggcaaaggcggttgctgaggggatcccaaagctccgcatcgaggagtgcgctgccagaaggcaggcgcggattgattccggctctgaggttatcgtcggggtgaacaagtatcaattggaaaaagaagacgccgtggaagttcttgccatcgacaacacaagtgtgagaaatcgacagatcgagaagttgaagaagatcaaatcatcccgggaccaggcattggccgaacgctgcctggccgctttgaccgaatgtgcggccagcggggacgggaacatcctcgccctcgcagtcgatgctagcagagcccgctgcaccgtaggcgagatcaccgatgctctcaagaaagtcttcggggagcataaagccaacgatagaatggtctctggtgcatatcggcaggaatttggcgaaagcaaagaaataacgtctgccatcaagcgcgtgcataagtttatggaacgggaaggacggcgcccgagactgctggtagctaagatgggacaagatggacacgataggggggcaaaggttattgcaacaggtttcgccgacctcggatttgatgttgatattggtcctttattccagacaccacgcgaagtggctcagcaggcagtagacgccgacgtgcatgccgttggcgtttcaaccctggctgctggccacaagaccctcgtgcccgagctgataaaagaactcaacagcctggggaggccagacattctggtcatgtgcggaggagtgatccctcctcaggactacgaatttttgttcgaagtgggagtatcaaacgtctttggtcctggcacccgcatcccaaaggccgctgtccaggtcctggacgacattgaaaagtgtctggaaaagaaacaacaatcagta

SEQ ID NO: 200 - DNA, 2250 bp, Artificial Sequence
  Codon optimized sequence that encodes an MCM polypeptide with the I671V mutation
atgctgagggctaagaatcagctctttctgttgtccccacactatttacggcaggtgaaagagagcagtggttctaggctgatccagcagcggctcctgcaccagcagcagccattgcatcctgagtgggcggctctcgccaagaaacagctgaagggaaagaacccagaggatttgatttggcacactcccgagggcatcagcatcaaacccctgtattcgaagcgcgacacaatggacctccccgaagaactaccaggagtgaagccctttacgcggggaccctatcccaccatgtataccttccgcccgtggacgattcgccagtacgcaggtttctcaaccgttgaggaatcaaacaagttttataaagacaatatcaaggctggccagcagggactctccgtggcatttgacctggcaacccaccgtgggtacgattccgataacccccgcgtacggggtgatgttgggatggccggcgtcgctattgacactgttgaagacacgaagattctctttgacggaatcccgctggagaagatgagcgtttcaatgacaatgaatggagcagtgatccccgtcttggccaactttatagtgacgggggaggagcagggcgtgcctaaggagaaactgacaggcacaatccagaatgacatcttaaaagagttcatggttaggaatacctacatcttcccccccgaaccttcaatgaagatcattgccgatatcttcgaatacactgcaaagcacatgcccaagtttaactctatttccattagcggatatcacatgcaggaagccggagcagacgctatcctggaattggcgtacaccttagccgacgggttggaatattcccggacagggctccaggcggggctgacaatagacgagtttgcacccaggctgtccttcttctggggcataggaatgaatttctacatggagatcgctaagatgcgagctgggagaagactctgggcccacctcattgagaaaatgttccagcccaaaaacagcaaatccctgcttctgagagctcactgccaaacaagtggctggagtctcaccgaacaagatccgtataacaatatcgttaggacagcaattgaggcaatggcggcagtgttcgggggaacacagtccttgcacacgaatagttttgacgaggcactcggcctgcccacggtcaagtcggcacgaatagccaggaacacacagatcatcatccaggaggaatctggcattcccaaagtagccgatccatggggcggatcctacatgatggaatgtcttacaaacgatgtatacgacgccgctctgaagctcattaacgaaatcgaggagatgggaggtatggccaaagctgtggcggaaggaatcccaaagctccgaatcgaggaatgcgccgcccggcggcaagccaggatcgactcaggatcagaagtcattgtcggtgtcaacaagtatcaactggaaaaagaggatgcagtcgaagtgctggccatcgataatactagtgtccggaatcgccagattgaaaaactgaagaaaattaaatcctctcgcgaccaggcattggctgagagatgcctggcagcacttacagagtgtgccgccagtggggatggaaacatccttgctctggcagtggatgcctcccgcgcccgttgcactgttggtgagatcacggatgctctgaagaaggtgttcggcgaacacaaggcaaacgacagaatggtgagcggcgcctaccggcaggagttcggggaaagcaaagaaatcacctcagcaattaagagagtgcacaaattcatggaaagagaaggacgcaggcccagacttttggtggcgaagatgggacaagatggccacgaccgtggtgctaaagtaatcgcaacaggttttgcagatctgggcttcgatgtggatattggaccgctcttccagacgccacgcgaggtcgctcagcaagctgttgacgctgacgttcatgccgtgggggtctctacgctggctgccggccataaaaccctggtccctgagctgatcaaagagctgaatagtctcggtcggcccgacatcctcgtcatgtgcggcggagttataccccctcaggactacgagtttctttttgaagtgggggtctccaatgtcttcggcccgggaactcggattccaaaggctgccgttcaggtgctcgacgacatagaaaaatgtctggagaaaaagcaacaatcagta

SEQ ID NO: 201 - DNA, 2250 bp, Artificial Sequence
  Codon optimized sequence that encodes an MCM polypeptide with the I671V mutation
atgctgagagcaaagaatcagctgtttttgctgagcccgcactacctgcggcaagtaaaagagtcttctgggagcaggctaatacaacagcgccttctgcaccaacaacagcctctccatccagagtgggccgctcttgctaaaaagcaactgaagggcaagaacccagaggatcttatttggcacaccccggaggggatttccatcaagcccctctactccaaacgggacaccatggacctccccgaagaacttcccggcgtaaagccatttacacgaggtccctatccgacaatgtacacatttcggccgtggacaatccgacagtacgctggctttagcaccgtggaagaatcaaacaaattctacaaagataatatcaaagctgggcaacaaggactgtcagtcgcattcgaccttgctacacatcgaggatacgattccgataacccgcgcgtcagaggtgacgtaggaatggcaggggtggcgatcgacaccgtcgaggacacaaaaatattgttcgatgggattcccctggaaaagatgtccgttagcatgacaatgaatggagcagttattccggtgttggcaaatttcatagtgacgggtgaggagcagggtgtccctaaagagaagctaactggcacaattcagaatgatatcctgaaagaattcatggtgcgcaatacctatatctttcctccagaaccttctatgaagattatagcagacatatttgagtacaccgcaaaacacatgcccaagttcaactcgatttctatttctgggtaccacatgcaagaggccggagccgacgccatactggaactcgcctacactctcgcagatggactcgagtactcaaggacaggcttgcaggccgggctgacaatcgacgagttcgctcccagacttagctttttctggggcatcggcatgaacttttatatggaaatcgccaaaatgagggcaggccgacgtctatgggcccatctgatcgagaagatgttccaaccaaagaattccaagtccctactccttagggcgcattgccagacctccggatggagcctgaccgaacaggatccatacaataacattgttagaacagccatcgaagcaatggccgcagttttcggcggaactcagtcccttcatacaaatagcttcgacgaggcactgggtctgcctaccgtgaaatctgccagaatcgctcgtaatacccagataataatccaggaggaatcaggtatccctaaggtcgccgacccctggggggggtcttatatgatggaatgtctaaccaacgacgtctatgacgctgctctcaaactcattaatgaaattgaagaaatgggcggtatggccaaagctgtcgcagagggcattcctaagctgcgcatagaggaatgcgcagcaaggaggcaagcacggatcgattccggatctgaggtaatcgtgggcgtcaacaagtatcagttggagaaggaggacgccgtcgaggtcttggcaattgataacaccagcgttcggaatcgtcagatcgaaaaactgaaaaagatcaagtcttctcgagatcaggccttggcagagcgttgtctggctgctttaaccgagtgcgcagcctctggagacggaaatatcctggccctggccgtggacgcctcccgggcacgctgtacagtgggggaaattacagatgctctgaagaaagtattcggagagcacaaagcaaatgaccgaatggtctccggcgcctataggcaggaattcggcgaatcgaaagaaatcacctcagcgattaagagagtccacaaattcatggagcgcgaaggaaggcggccacgtttactcgtagccaaaatggggcaggacggccatgatcggggagctaaagtaatagcaaccggtttcgcagacctggggtttgacgtggacattggtccattgtttcagacccccagggaggttgctcagcaggctgtggacgcggacgtgcatgccgtgggagtgtcgaccctggctgcaggacacaaaacactagtccccgaactcattaaagagctcaactcactgggtcggcccgatatactggttatgtgtggtggggtgattcccccacaggactatgagttcttattcgaggttggtgttagtaatgtctttggaccagggaccaggattcccaaggcagcggtgcaagtgttagacgacattgaaaaatgcctggaaaagaagcagcagtcagtg

SEQ ID NO: 202 - DNA, 2250 bp, Artificial Sequence
  Codon optimized sequence that encodes an MCM polypeptide with the I671V mutation
atgctgcgcgcaaagaatcaacttttcctgctgtccccacactacctccgtcaagtgaaggagtcctccggcagcaggctgatccagcaacgactgttacaccaacagcagcctctgcacccagaatgggctgctttagcaaagaagcagctgaaaggaaagaacccagaagacctaatatggcacacgcctgaaggtatctccattaagcctctgtactcaaaacgggacactatggatctccctgaggagctgccaggcgtcaaaccgtttactcgcggtccttaccctactatgtacacattccggccatggaccatacgacagtatgctggattctctaccgtggaagagagcaataagttctacaaggataatattaaggcaggccagcagggactgagcgtagcgtttgatcttgccacacaccgtgggtatgactctgataatccacgagtaagaggggacgtcggtatggccggagttgcaatcgatactgtagaggatacaaaaattctctttgatgggataccgctcgagaagatgtccgtaagcatgactatgaacggtgccgtgatccccgtgctcgctaactttatcgtcaccggcgaagaacagggcgtgcccaaggagaaattgacaggtacaatccagaacgatattctaaaggagttcatggtgcggaatacatacatttttccacccgaaccctctatgaaaatcattgccgacatcttcgagtacaccgccaagcatatgcctaagttcaactctatttctataagcggctatcacatgcaggaagcaggtgccgacgccattctcgaactggcttataccttggcagatggactggaatattcaagaaccgggcttcaggccggtctcacaattgacgaatttgcgcctcgactgagtttcttttggggaataggtatgaatttctatatggaaatagccaagatgcgcgccggcagaaggctttgggcccatttgatcgagaaaatgtttcagccaaaaaacagcaaaagtctgctcttacgcgcccactgtcagacctctggctggtcgttgacagaacaggatccctataacaacatcgtacggactgctattgaggcaatggcagcagtgtttggcggaacccagagcctgcataccaattcatttgacgaagctctgggtctgccaactgtgaaatcagcccgcattgcccgcaacacccagattataatacaggaagaaagtggcattcccaaagtggcggatccttggggaggaagctacatgatggagtgcctgactaatgacgtatacgatgcggcgctgaaactgatcaatgaaatagaagaaatggggggaatggccaaggccgtggcggagggcatacctaaactaaggatcgaggagtgtgcagccagacgccaggctcgcatcgactccggaagtgaagttatagttggcgtgaataaatatcagttagagaaggaggatgccgtggaggtgctggcgatcgataataccagcgtccgcaataggcagatagaaaagttgaaaaagattaaatcgtcccgcgaccaggccctggccgaacgctgtctggccgcactcactgagtgtgccgcaagtggagatggcaatatcctcgctctagcagtggacgcctccagggcaagatgcaccgtgggagaaatcaccgatgccctgaagaaagtgttcggagaacataaagccaatgatcgcatggtgagcggggcgtatagacaggaatttggagaatctaaggagattacaagcgctatcaagagggtgcacaaatttatggaaagggaagggaggcgccccaggctacttgtggccaaaatggggcaggacggccatgacaggggcgccaaggtgatagccactggcttcgcggacttggggtttgatgttgatatcggccccctcttccaaacaccccgcgaggtggcgcaacaggcagtggatgccgatgttcacgcagtgggggtgagtacactcgccgcgggccacaagaccttagttcctgagctgataaaagagctcaattccctcgggaggcctgatatcctggtgatgtgcggaggagtcattcccccacaagactacgagtttttatttgaggtgggcgtttctaatgtcttcgggcctggaacccggatcccaaaagcagccgtacaggtgctggacgatattgaaaaatgccttgagaaaaagcagcagtccgtc

SEQ ID NO: 203 - DNA, 2250 bp, Artificial Sequence
  Codon optimized sequence that encodes an MCM polypeptide with the I671V mutation
atgctccgagcgaagaaccagctattcctgctcagcccgcactacctgcggcaggtgaaggagtcaagcggctcacgcctgatccagcagagactgctgcaccaacagcaacccctgcacccagagtgggcagccctggccaagaagcagctcaaggggaagaaccccgaagacctgatctggcacacaccagaagggatatccataaaaccactatacagcaaaagggacacgatggacctcccagaagagctgccaggcgtgaagcccttcacccgcgggccatacccaaccatgtacaccttcagaccatggacaatccggcagtacgcggggttctcaaccgtggaggagtccaacaaattctacaaggacaacatcaaagcagggcagcagggcctgagtgtagcattcgacctggcaacgcacaggggatacgactccgacaaccccagggtgcggggcgacgtgggcatggccggggtcgccatcgacacggtggaagacacaaagatcctgttcgacggcatccccctggagaaaatgtccgtgtcgatgacaatgaacggggccgtgatccccgtgctagcaaacttcatcgtcacaggggaggagcagggggtgccaaaagaaaaactgacaggcacaatccagaacgacatactcaaggagttcatggtcaggaacacctacatcttccccccagagccatcgatgaaaatcatcgccgacatcttcgagtacaccgccaagcacatgccaaaattcaactcgatctccatatcaggctaccacatgcaggaggccggcgccgacgccatactggagctggcgtacacgctggcggacggcctcgaatacagccggacaggcctgcaagccggactgaccatcgacgaattcgccccaagactgagtttcttctggggcatcgggatgaacttctacatggaaatcgcaaaaatgagagcgggccgacggctctgggcgcacctgatcgaaaagatgttccagccaaagaactccaagtccctcctcctcagagcccactgccagacatcaggctggtccctcaccgagcaggacccctacaacaacatagtgaggaccgccatcgaagcgatggccgcggtgttcggagggacgcagtccctgcacaccaacagcttcgacgaggcactcggcctgcccacggtcaaatccgcacgcatcgcccggaacacacagatcatcatacaggaggagagcggcatcccaaaggtggcagacccatggggcggctcatacatgatggagtgcctcacgaacgacgtgtacgacgccgcactgaaactcatcaacgaaatcgaagagatgggaggaatggcaaaggcggtggcggagggcatccccaagctgcgcatcgaggaatgcgccgcccggcggcaagcccggatcgactcaggatccgaagtgatcgtgggagtgaacaagtaccagctggaaaaggaggacgcagtggaggtcctcgcaatcgacaacacctcagtgcggaaccggcagatcgaaaagctgaaaaaaatcaaaagctcacgagaccaggccctggcagagcggtgcctggcagccctgacagagtgcgcagccagcggagacggaaacatcctcgccctggcggtggacgcctcgagagccagatgcaccgtcggcgagatcaccgacgcactgaaaaaggtgttcggagaacacaaggcaaacgaccgaatggtgagtggagcgtaccgccaggaattcggggagtccaaagaaatcacctcggcaataaagcgggtgcacaaattcatggaaagagaggggcggaggcccagactgctcgtggccaaaatgggccaggacggacacgacagaggcgccaaggtgatcgcgacagggttcgcggacctgggcttcgacgtggacataggcccgctgttccagacgccacgagaggtggcacaacaggcggtggacgccgacgtgcacgcggtgggggtgtccacactggccgcaggccacaaaacgctcgtacccgagctgatcaaagagctgaactcactgggacggcccgacatcctggtgatgtgcggcggagtgatcccaccacaggactacgaattcctgttcgaagtgggggtctccaacgtcttcggcccagggacaaggatccccaaggcagccgtgcaggtgctcgacgacatagagaaatgcctggagaagaaacagcaatcggta

SEQ ID NO: 204 - DNA, 2250 bp, Artificial Sequence
  Codon optimized sequence that encodes an MCM polypeptide with the I671V mutation
atgctaagagcaaagaaccagctgttcctgctgtcaccacactacctgagacaagtcaaggaaagttccggcagcagactgatccagcagcggctgctacaccaacagcagcccctgcacccagagtgggcagccctggccaaaaaacagctgaagggcaaaaacccagaggacctcatctggcacacaccagaggggatcagtataaagcccctgtacagtaaaagagacacaatggacctccccgaagagctacccggagtgaagccattcacacgagggccctacccaaccatgtacaccttccggccctggaccatcaggcagtacgccggcttcagcacagtcgaggagagtaacaaattctacaaagacaacatcaaggccgggcagcaggggctgtcagtggccttcgacctggccacacaccgggggtacgactcggacaacccgagggtgaggggggacgtgggaatggcaggagtggccatagacaccgtcgaggacaccaagatcctgttcgacggaatccccctggaaaagatgtcggtctccatgacgatgaacggcgccgtcatccccgtgctagccaacttcatcgtcaccggggaggaacagggagtgccgaaagagaaactgaccgggacgatccagaacgacatcctgaaagagttcatggtaagaaacacatacatattcccaccggaacccagtatgaagatcatcgcggacatattcgaatacaccgcaaaacacatgcccaagttcaactcgatcagcatatccgggtaccacatgcaggaagcaggggccgacgccatcctggaactcgcctacaccctagcagacggactggagtacagccgcaccggactgcaggcagggctgacgatagacgagttcgccccccggctgagtttcttctggggaatagggatgaacttctacatggagatagcgaagatgcgcgccggccgccggctgtgggcacacctgatcgaaaagatgttccagcccaagaactcaaaatcgctgctcctcagggcacactgccagacaagcgggtggagcctaaccgagcaagacccgtacaacaacatcgtccgaacagcaatcgaagccatggccgccgtcttcggcgggacacagagcctccacaccaactcattcgacgaagccctggggctgcccaccgtcaaatcagccaggatcgcccgaaacacccagatcataatccaggaagagtcggggatcccaaaggtagccgacccctgggggggatcctacatgatggagtgcctgaccaacgacgtgtacgacgccgccctgaagctgatcaacgagatcgaggagatgggaggcatggccaaggccgtggcggaaggaatcccgaagctgcgcatcgaagaatgcgccgccagacggcaggcccggatcgactccggatccgaggtgatcgtgggcgtcaacaagtaccagctggagaaggaggacgccgtcgaggtgctggccatcgacaacaccagcgtgcgaaacaggcagatagaaaagctcaaaaagatcaagtcatcgagggaccaggccctggcagagaggtgcctggcagccctgaccgagtgcgcggcctccggagacggcaacatactggccctcgccgtggacgcaagcagagcccgctgcaccgtcggagagataacagacgccctgaagaaagtgttcggggagcacaaggccaacgaccggatggtgagcggggcctacaggcaggaattcggggagagcaaggagatcaccagcgccatcaaacgggtgcacaaattcatggagagggaagggcgacgcccccgcctgctcgtggccaagatgggacaggacggccacgaccggggcgcaaaagtgatcgcaaccggcttcgcggacctgggcttcgacgtggacataggaccactgttccagacaccgagagaggtggcccagcaggcagtggacgcagacgtccacgccgtaggggtgtccacactggccgccggacacaagaccctagtccccgagctgatcaaagagctgaacagtctgggcaggccagacatcctggtcatgtgcggcggggtgatccccccccaggactacgagttcctattcgaggtgggagtaagtaacgtgttcggacccgggaccagaatcccaaaggcagccgtccaggtcctggacgacatcgagaaatgcctggaaaagaagcagcagagtgta

SEQ ID NO: 205 - DNA, 2250 bp, Artificial Sequence
  Codon optimized sequence that encodes an MCM polypeptide with the I671V mutation
atgctgcgcgctaagaatcaactcttcctgctgagtcctcactacctgcggcaggtcaaggagtccagcgggtcccggttaattcagcagaggctgctccaccagcagcagcccttacaccccgaatgggccgctcttgcgaagaagcagctcaagggaaagaaccctgaggacctcatttggcataccccagaagggatttccatcaaacctctgtattccaagagagataccatggatcttcccgaagagctaccaggagtgaagcctttcaccaggggcccctacccgaccatgtacacctttcggccttggaccatccgccaatatgctggattctccactgtagaagagtccaacaaattttataaagataatataaaggctgggcaacagggcttatccgtcgctttcgatttggcaactcataggggttacgactcggataatccacgcgtccggggggacgtaggtatggctggggtggctatcgacaccgtggaggataccaagatccttttcgatggaattcccctggagaagatgtccgtaagtatgaccatgaatggggcggtcattcccgtactggctaacttcattgtcactggagaagaacagggagtgcccaaggagaagcttacaggcacaatccaaaatgacatcctgaaggagttcatggttcgcaacacctacatcttcccgccagaaccaagtatgaagataatcgcggacatcttcgagtatactgccaaacacatgcccaaattcaacagtatctcaatttctggctaccacatgcaggaggctggagccgatgctatcttggaactggcatatactctagcagatggactggagtactcccgcaccggcctccaggcaggcctcaccatagacgagttcgcgccgcgcttgtcatttttctggggcatcggtatgaacttttacatggaaatcgccaagatgcgggcaggtcgccggctttgggcacacctgattgagaagatgttccagcctaagaattctaaatcactgctactgagagcccactgtcagacctctggatggtctctaactgaacaagatccctataataacatcgtgcgcacggcgattgaggccatggcagcggtcttcgggggcacacaaagtttgcatacaaacagttttgatgaggcccttggcttacccactgtgaagtcagctagaatcgccaggaatactcagattattatccaagaggaatccggcataccaaaggtggccgacccctgggggggctcctatatgatggagtgcctgactaacgatgtatacgatgcagccctcaaattgattaatgagatcgaagaaatgggagggatggctaaagccgtcgcagagggaatacctaaactgcgcatcgaagaatgcgcagcacggaggcaggcccggatagatagtggtagtgaggtgatcgtgggcgtgaacaagtaccagctggaaaaagaggatgccgtagaagtcctggctattgataatacttcagtccgcaacaggcaaattgagaaactcaagaaaattaagtcatcaagagatcaggccttagctgagcgctgtctcgctgcactgacagaatgcgccgctagtggtgacggcaatatcctggcactcgccgttgatgcgtcacgcgcccgttgcacagtgggcgaaattacagacgccctcaagaaagtgttcggagagcacaaggctaacgatcgaatggtgagcggagcttacaggcaggaatttggtgaaagtaaggaaattacttccgctatcaaacgcgtgcataaattcatggagcgtgaaggtaggagaccaagactcctggtagccaaaatgggacaggatggtcatgaccgcggagcaaaagtgatcgccaccgggttcgcagatttgggcttcgacgttgacatcggtcctcttttccagacaccccgagaggttgcacagcaagcagtggacgctgacgtgcacgcagtgggcgtgtccacactcgcagcaggtcataaaactctggtcccggagctgattaaggagctcaatagtctgggacgccctgacatccttgtcatgtgcgggggcgtcattcccccgcaggactatgaatttctgttcgaggttggggtcagcaacgtcttcgggcccggcaccagaatccctaaagctgcggtgcaagtgttggatgacattgagaagtgcctcgagaagaaacagcagtccgtc

SEQ ID NO: 206 - DNA, 2250 bp, Artificial Sequence
  Codon optimized sequence that encodes an MCM polypeptide with the I671V mutation
atgctgcgagcgaagaatcagctgtttcttctgagtcctcattaccttcggcaggtgaaggaatcctctggatcccgtctgatccagcagcgccttctgcaccagcaacagccacttcaccccgagtgggcggcgctggcaaagaagcagttgaaggggaagaaccctgaagatctgatttggcacaccccggagggtatctctattaagccgctttactccaaacgagacactatggatctgccagaggagctgcccggagtaaagccatttactcggggcccatatcctaccatgtacactttccggccatggaccatacgacagtatgctggtttcagcacagtcgaggaaagtaacaaattttataaggacaatatcaaagcgggccaacaaggactcagtgtagcatttgatctcgctacccacaggggctacgactccgataaccctagagtccggggtgacgtcggaatggcaggcgtcgccatcgacacggtggaggatacgaagattctgtttgacggaatccccctggagaagatgtcagtttctatgacgatgaatggggccgttatccccgtattggctaacttcatcgtgacaggtgaggagcagggggttccgaaggagaagttaaccggtaccatccagaatgatatcctgaaggagtttatggtgaggaacacctacattttcccccctgagccttctatgaagattatcgctgacattttcgagtatactgctaagcacatgcccaagttcaactctatcagcatcagcggttaccacatgcaggaagctggagccgatgctattctcgagctggcatataccctagcggatggtcttgagtatagtagaaccggcttgcaggctggtctgaccatcgacgaatttgctcccagactcagcttcttttggggtatcggcatgaacttctacatggaaatcgctaaaatgagagcagggcggagactctgggcccacctgatcgagaagatgttccagcccaaaaactctaaatcactgctcctcagggcccactgtcagacatccggctggagtttgaccgaacaggatccctacaataacattgttagaactgcaatcgaagctatggccgcagtctttggtggcacccagagtcttcacactaacagtttcgacgaggctttggggttacccaccgtaaaatcagcccgaattgcccggaacacccaaataatcatccaggaagaatccggaattcctaaggtggctgatccttggggcgggagctatatgatggagtgcctgaccaacgatgtgtatgacgctgcgcttaaactgattaatgaaatcgaggagatgggcggtatggccaaagccgttgccgaagggattcccaaacttagaattgaagaatgtgcggcccgcagacaagctcgaattgattccggcagcgaagtgattgtgggcgtgaataagtatcaactcgagaaggaagacgccgtcgaagtattggccatcgacaatacatccgtgcggaatcgtcagatcgaaaaactgaaaaagatcaagtcaagccgcgatcaagctctagctgaaaggtgcttagccgcgctgacggagtgtgccgcttccggggacggtaatatcctcgccctggctgttgacgcttctagggcgagatgcacagtgggcgaaattacagatgcgttgaaaaaggtattcggtgagcataaggctaacgaccggatggtgagtggcgcgtatcggcaagagttcggcgagtctaaagagattacatccgctatcaagcgggtgcacaaattcatggagcgggaggggcgccgaccgaggttgttggtagccaagatgggacaggacggacatgatcggggggctaaggttattgccacagggttcgcagacctcggcttcgacgtggatatcgggcccctgttccagacaccacgcgaggtcgcccaacaggccgtcgacgcagacgtgcacgcagtgggtgtgagtaccctggctgccggacacaaaaccctcgtgcccgaacttatcaaggaattgaacagtcttggcaggccagacatattggttatgtgtggaggggttattccccctcaggactacgagtttttgttcgaagtgggcgtgagcaatgtgtttggccctgggacacgaatccctaaggccgcggtacaggtgctggacgatatcgagaaatgtctggagaagaaacagcagtctgtg

SEQ ID NO: 207 - DNA, 2250 bp, Artificial Sequence
  Codon optimized sequence that encodes an MCM polypeptide with the I671V mutation
atgctgagggcaaaaaatcaactgttcctgcttagcccgcattacctgaggcaggtgaaagagtctagtggatctaggctgattcagcaacgcctcctgcaccaacagcaaccgttacaccccgagtgggccgccctggctaaaaaacagctgaagggtaaaaatcccgaagatcttatttggcatacccctgagggaatatcaatcaagccgctgtattccaaacgggacaccatggatcttcccgaagagctgcccggggtgaaaccattcactcggggaccctacccaactatgtacacgttccggccatggaccatcaggcagtacgccggtttctcaaccgtggaggagtccaataagttttataaggacaatattaaagccggtcagcagggcctgtccgtggctttcgatcttgccacgcatcgaggatacgactcggacaacccccgggtccgcggcgatgtgggcatggctggcgtagctatcgacactgttgaggataccaaaatcttattcgatggaataccacttgagaaaatgagtgtgagtatgacaatgaatggcgccgttattccggttctagccaattttattgtgacaggcgaggaacaaggtgttccgaaggagaagctgactgggacaatccaaaacgatattttaaaagagtttatggtgcgtaatacctacatttttccacccgaaccctcaatgaaaattatagcagatatctttgaatatacggctaagcacatgccaaagttcaactctatcagtatttcaggctaccacatgcaggaggctggggccgacgctattcttgagctcgcctatacactcgctgacgggttggagtatagccgcaccggtctccaggcaggactgaccattgacgaattcgcaccacgactctctttcttctggggcatcggcatgaacttttacatggaaattgccaagatgagagccgggcggcgactttgggcccatctgatcgagaagatgttccagccgaaaaactctaaatctttgctgttgcgcgctcattgccagacttcaggttggtcacttactgagcaggatccttacaacaatatagtgcgtaccgccattgaggctatggccgctgtctttggggggacccagtcgctgcacaccaacagttttgatgaagctctggggctaccaaccgttaagtctgctcggatcgcacgaaatacccagattataatccaggaagaatccgggatcccaaaagtggccgatccctggggcggcagttacatgatggagtgcctcacaaatgatgtatatgacgcagcccttaagcttataaacgaaattgaagaaatgggcggaatggccaaggcagttgcggagggaatacctaagcttcggatcgaagagtgtgctgcacggcgtcaggctcgcatagattccgggtcagaggtgatcgttggagtgaacaaatatcaattggaaaaggaagatgcagtggaggtattggccatcgacaatacctccgttcggaacaggcagatagagaaacttaaaaagattaagagctctcgtgaccaagctctcgcagagaggtgcctggccgctctgactgagtgcgccgccagcggagacgggaatatactcgccttggcagtcgacgcgagccgagcccggtgcacagtgggagaaatcactgatgccctaaagaaagtgttcggcgaacacaaggctaatgaccgaatggtgagcggagcctaccgtcaggagtttggtgaaagcaaggaaatcacctctgctatcaagcgggtgcacaagtttatggagagagaaggcaggagacctcgcttgcttgtggccaagatgggccaggacgggcatgacaggggtgccaaggtgatcgcaacagggttcgccgacttgggcttcgacgtcgatatcgggcccctgtttcagactcctcgagaggttgcacagcaagcggtggatgctgatgttcatgccgttggtgtaagcactctggcggccggacacaaaaccctcgtcccagaattaataaaggagttgaatagcctgggccggcccgatattctcgtaatgtgcggcggagtgataccgccgcaggactatgagtttttgtttgaggtaggcgtcagtaatgtgttcggacctggtacccggattccaaaggcagcggtgcaggtgcttgacgatatcgaaaagtgcctggaaaagaaacagcagtccgtc

SEQ ID NO: 208 - protein, 750 aa, Homo Sapian
MLRAKNQLFLLSPHYLRQVKESSGSRLIQQRLLHQQQPLHPEWAALAKKQLKGKNPEDLIWHTPEGISIKPLYSKRDTMDLPEELPGVKPFTRGPYPTMYTFRPWTIRQYAGFSTVEESNKFYKDNIKAGQQGLSVAFDLATHRGYDSDNPRVRGDVGMAGVAIDTVEDTKILFDGIPLEKMSVSMTMNGAVIPVLANFIVTGEEQGVPKEKLTGTIQNDILKEFMVRNTYIFPPEPSMKIIADIFEYTAKHMPKFNSISISGYHMQEAGADAILELAYTLADGLEYSRTGLQAGLTIDEFAPRLSFFWGIGMNFYMEIAKMRAGRRLWAHLIEKMFQPKNSKSLLLRAHCQTSGWSLTEQDPYNNIVRTAIEAMAAVFGGTQSLHTNSFDEALGLPTVKSARIARNTQIIIQEESGIPKVADPWGGSYMMECLTNDVYDAALKLINEIEEMGGMAKAVAEGIPKLRIEECAARRQARIDSGSEVIVGVNKYQLEKEDAVEVLAIDNTSVRNRQIEKLKKIKSSRDQALAERCLAALTECAASGDGNILALAVDASRARCTVGEITDALKKVFGEHKANDRMVSGAYRQEFGESKEITSAIKRVHKFMEREGRRPRLLVAKMGQDGHDRGAKVIATGFADLGFDVDIGPLFQTPREVAQQAVDADVHAVGISTLAAGHKTLVPELIKELNSLGRPDILVMCGGVIPPQDYEFLFEVGVSNVFGPGTRIPKAAVQVLDDIEKCLEKKQQSV

SEQ ID NO: 209 - protein, 750 aa, Artificial Sequence
  MCM I69V
MLRAKNQLFLLSPHYLRQVKESSGSRLIQQRLLHQQQPLHPEWAALAKKQLKGKNPEDLIWHTPEGISVKPLYSKRDTMDLPEELPGVKPFTRGPYPTMYTFRPWTIRQYAGFSTVEESNKFYKDNIKAGQQGLSVAFDLATHRGYDSDNPRVRGDVGMAGVAIDTVEDTKILFDGIPLEKMSVSMTMNGAVIPVLANFIVTGEEQGVPKEKLTGTIQNDILKEFMVRNTYIFPPEPSMKIIADIFEYTAKHMPKFNSISISGYHMQEAGADAILELAYTLADGLEYSRTGLQAGLTIDEFAPRLSFFWGIGMNFYMEIAKMRAGRRLWAHLIEKMFQPKNSKSLLLRAHCQTSGWSLTEQDPYNNIVRTAIEAMAAVFGGTQSLHTNSFDEALGLPTVKSARIARNTQIIIQEESGIPKVADPWGGSYMMECLTNDVYDAALKLINEIEEMGGMAKAVAEGIPKLRIEECAARRQARIDSGSEVIVGVNKYQLEKEDAVEVLAIDNTSVRNRQIEKLKKIKSSRDQALAERCLAALTECAASGDGNILALAVDASRARCTVGEITDALKKVFGEHKANDRMVSGAYRQEFGESKEITSAIKRVHKFMEREGRRPRLLVAKMGQDGHDRGAKVIATGFADLGFDVDIGPLFQTPREVAQQAVDADVHAVGISTLAAGHKTLVPELIKELNSLGRPDILVMCGGVIPPQDYEFLFEVGVSNVFGPGTRIPKAAVQVLDDIEKCLEKKQQSV

SEQ ID NO: 210 - protein, 750 aa, Artificial Sequence [sequence omitted]

SEQ ID NO: 211 - protein, 750 aa, Artificial Sequence [sequence omitted]

SEQ ID NO: 212 - protein, 750 aa, Artificial Sequence
  MCM T598A
MLRAKNQLFLLSPHYLRQVKESSGSRLIQQRLLHQQQPLHPEWAALAKKQLKGKNPEDLIWHTPEGISIKPLYSKRDTMDLPEELPGVKPFTRGPYPTMYTFRPWTIRQYAGFSTVEESNKFYKDNIKAGQQGLSVAFDLATHRGYDSDNPRVRGDVGMAGVAIDTVEDTKILFDGIPLEKMSVSMTMNGAVIPVLANFIVTGEEQGVPKEKLTGTIQNDILKEFMVRNTYIFPPEPSMKIIADIFEYTAKHMPKFNSISISGYHMQEAGADAILELAYTLADGLEYSRTGLQAGLTIDEFAPRLSFFWGIGMNFYMEIAKMRAGRRLWAHLIEKMFQPKNSKSLLLRAHCQTSGWSLTEQDPYNNIVRTAIEAMAAVFGGTQSLHTNSFDEALGLPTVKSARIARNTQIIIQEESGIPKVADPWGGSYMMECLTNDVYDAALKLINEIEEMGGMAKAVAEGIPKLRIEECAARRQARIDSGSEVIVGVNKYQLEKEDAVEVLAIDNTSVRNRQIEKLKKIKSSRDQALAERCLAALTECAASGDGNILALAVDASRARCTVGEITDALKKVFGEHKANDRMVSGAYRQEFGESKEIASAIKRVHKFMEREGRRPRLLVAKMGQDGHDRGAKVIATGFADLGFDVDIGPLFQTPREVAQQAVDADVHAVGISTLAAGHKTLVPELIKELNSLGRPDILVMCGGVIPPQDYEFLFEVGVSNVFGPGTRIPKAAVQVLDDIEKCLEKKQQSV

SEQ ID NO: 213 - protein, 750 aa, Artificial Sequence [sequence omitted]

SEQ ID NO: 214 - DNA, 2250 bp, Homo sapiens
atgttaagagctaagaatcagctttttttactttcacctcattacctgaggcaggtaaaagaatcatcaggctccaggctcatacagcaacgacttctacaccagcaacagccccttcacccagaatgggctgccctggctaaaaagcagctgaaaggcaaaaacccagaagacctaatatggcacaccccggaagggatctctataaaacccttgtattccaagagagatactatggacttacctgaagaacttccaggagtgaagccattcacacgtggaccatatcctaccatgtatacctttaggccctggaccatccgccagtatgctggttttagtactgtggaagaaagcaataagttctataaggacaacattaaggctggtcagcagggattatcagttgcctttgatctggcgacacatcgtggctatgattcagacaaccctcgagttcgtggtgatgttggaatggctggagttgctattgacactgtggaagataccaaaattctttttgatggaattcctttagaaaaaatgtcagtttccatgactatgaatggagcagttattccagttcttgcaaattttatagtaactggagaagaacaaggtgtacctaaagagaagcttactggtaccatccaaaatgatatactaaaggaatttatggttcgaaatacatacatttttcctccagaaccatccatgaaaattattgctgacatatttgaatatacagcaaagcacatgccaaaatttaattcaatttcaattagtggataccatatgcaggaagcaggggctgatgccattctggagctggcctatactttagcagatggattggagtactctagaactggactccaggctggcctgacaattgatgaatttgcaccaaggttgtctttcttctggggaattggaatgaatttctatatggaaatagcaaagatgagagctggtagaagactctgggctcacttaatagagaaaatgtttcagcctaaaaactcaaaatctcttcttctaagagcacactgtcagacatctggatggtcacttactgagcaggatccctacaataatattgtccgtactgcaatagaagcaatggcagcagtatttggagggactcagtctttgcacacaaattcttttgatgaagctttgggtttgccaactgtgaaaagtgctcgaattgccaggaacacacaaatcatcattcaagaagaatctgggattcccaaagtggctgatccttggggaggttcttacatgatggaatgtctcacaaatgatgtttatgatgctgctttaaagctcattaatgaaattgaagaaatgggtggaatggccaaagctgtagctgagggaatacctaaacttcgaattgaagaatgtgctgcccgaagacaagctagaatagattctggttctgaagtaattgttggagtaaataagtaccagttggaaaaagaagacgctgtagaagttctggcaattgataatacttcagtgcgaaacaggcagattgaaaaacttaagaagatcaaatccagcagggatcaagctttggctgaacgttgtcttgctgcactaaccgaatgtgctgctagcggagatggaaatatcctggctcttgcagtggatgcatctcgggcaagatgtacagtgggagaaatcacagatgccctgaaaaaggtatttggtgaacataaagcgaatgatcgaatggtgagtggagcatatcgccaggaatttggagaaagtaaagagataacatctgctatcaagagggttcataaattcatggaacgtgaaggtcgcagacctcgtcttcttgtagcaaaaatgggacaagatggccatgacagaggagcaaaagttattgctacaggatttgctgatcttggttttgatgtggacataggccctcttttccagactcctcgtgaagtggcccagcaggctgtggatgcggatgtgcatgctgtgggcataagcaccctcgctgctggtcataaaaccctagttcctgaactcatcaaagaacttaactcccttggacggccagatattcttgtcatgtgtggaggggtgataccacctcaggattatgaatttctgtttgaagttggtgtttccaatgtatttggtcctgggactcgaattccaaaggctgccgttcaggtgcttgatgatattgagaagtgtttggaaaagaagcagcaatctgta

SEQ ID NO: 215 - DNA, 47 bp, Artificial Sequence
  5UTR-001 Upstream UTR
gggaaataagagagaaaagaagagtaagaagaaatataagagccacc

SEQ ID NO: 216 - DNA, 47 bp, Artificial Sequence
  5UTR-002 Upstream UTR
gggagatcagagagaaaagaagagtaagaagaaatataagagccacc

SEQ ID NO: 217 - DNA, 145 bp, Artificial Sequence
  5UTR-003 Upstream UTR
ggaataaaagtctcaacacaacatatacaaaacaaacgaatctcaagcaatcaagcattctacttctattgcagcaatttaaatcatttcttttaaagcaaaagcaattttctgaaaattttcaccatttacgaacgatagcaac

SEQ ID NO: 218 - RNA, 42 nt, Artificial Sequence
  5UTR-004 Upstream UTR
gggagacaagcuuggcauuccgguacuguugguaaagccacc

SEQ ID NO: 219 - DNA, 47 bp, Artificial Sequence; identical to SEQ ID NO: 216
  5UTR-005 Upstream UTR

SEQ ID NO: 220 - DNA, 145 bp, Artificial Sequence; identical to SEQ ID NO: 217
  5UTR-006 Upstream UTR

SEQ ID NO: 221 - RNA, 42 nt, Artificial Sequence; identical to SEQ ID NO: 218
  5UTR-007 Upstream UTR

SEQ ID NO: 222 - DNA, 47 bp, Artificial Sequence
  5UTR-008 Upstream UTR
gggaattaacagagaaaagaagagtaagaagaaatataagagccacc

SEQ ID NO: 223 - DNA, 47 bp, Artificial Sequence
  5UTR-009 Upstream UTR
gggaaattagacagaaaagaagagtaagaagaaatataagagccacc

SEQ ID NO: 224 - DNA, 47 bp, Artificial Sequence
  5UTR-010 Upstream UTR
gggaaataagagagtaaagaacagtaagaagaaatataagagccacc

SEQ ID NO: 225 - DNA, 47 bp, Artificial Sequence
  5UTR-011 Upstream UTR
gggaaaaaagagagaaaagaagactaagaagaaatataagagccacc

SEQ ID NO: 226 - DNA, 47 bp, Artificial Sequence
  5UTR-012 Upstream UTR
gggaaataagagagaaaagaagagtaagaagatatataagagccacc

SEQ ID NO: 227 - DNA, 47 bp, Artificial Sequence
  5UTR-013 Upstream UTR
gggaaataagagacaaaacaagagtaagaagaaatataagagccacc

SEQ ID NO: 228 - DNA, 47 bp, Artificial Sequence
  5UTR-014 Upstream UTR
gggaaattagagagtaaagaacagtaagtagaattaaaagagccacc

SEQ ID NO: 229 - DNA, 47 bp, Artificial Sequence
  5UTR-015 Upstream UTR
gggaaataagagagaatagaagagtaagaagaaatataagagccacc

SEQ ID NO: 230 - DNA, 47 bp, Artificial Sequence
  5UTR-016 Upstream UTR
gggaaataagagagaaaagaagagtaagaagaaaattaagagccacc

SEQ ID NO: 231 - DNA, 47 bp, Artificial Sequence
  5UTR-017 Upstream UTR
gggaaataagagagaaaagaagagtaagaagaaatttaagagccacc

SEQ ID NO: 232 - DNA, 371 bp, Artificial Sequence
  3UTR-001 Creatine Kinase
gcgcctgcccacctgccaccgactgctggaacccagccagtgggagggcctggcccaccagagtcctgctccctcactcctcgccccgccccctgtcccagagtcccacctgggggctctctccacccttctcagagttccagtttcaaccagagttccaaccaatgggctccatcctctggattctggccaatgaaatatctccctggcagggtcctcttcttttcccagagctccaccccaaccaggagctctagttaatggagagctcccagcacactcggagcttgtgctttgtctccacgcaaagcgataaataaaagcattggtggcctttggtctttgaataaagcctgagtaggaagtctaga

SEQ ID NO: 233 - DNA, 568 bp, Artificial Sequence
  3UTR-002 Myoglobin
gcccctgccgctcccacccccacccatctgggccccgggttcaagagagagcggggtctgatctcgtgtagccatatagagtttgcttctgagtgtctgctttgtttagtagaggtgggcaggaggagctgaggggctggggctggggtgttgaagttggctttgcatgcccagcgatgcgcctccctgtgggatgtcatcaccctgggaaccgggagtggcccttggctcactgtgttctgcatggtttggatctgaattaattgtcctttcttctaaatcccaaccgaacttcttccaacctccaaactggctgtaaccccaaatccaagccattaactacacctgacagtagcaattgtctgattaatcactggccccttgaagacagcagaatgtccctttgcaatgaggaggagatctgggctgggcgggccagctggggaagcatttgactatctggaacttgtgtgtgcctcctcaggtatggcagtgactcacctggttttaataaaacaacctgcaacatctcatggtctttgaataaagcctgagtaggaagtctaga

SEQ ID NO: 234 - DNA, 289 bp, Artificial Sequence
  3UTR-003 alpha-actin
acacactccacctccagcacgcgacttctcaggacgacgaatcttctcaatgggggggcggctgagctccagccaccccgcagtcactttctttgtaacaacttccgttgctgccatcgtaaactgacacagtgtttataacgtgtacatacattaacttattacctcattttgttatttttcgaaacaaagccctgtggaagaaaatggaaaacttgaagaagcattaaagtcattctgttaagctgcgtaaatggtctttgaataaagcctgagtaggaagtctaga

SEQ ID NO: 235 - DNA, 379 bp, Artificial Sequence
  3UTR-004 Albumin
catcacatttaaaagcatctcagcctaccatgagaataagagaaagaaaatgaagatcaaaagcttattcatctgtttttctttttcgttggtgtaaagccaacaccctgtctaaaaaacataaatttctttaatcattttgcctcttttctctgtgcttcaattaataaaaaatggaaagaatctaatagagtggtacagcactgttatttttcaaagatgtgttgctatcctgaaaattctgtaggttctgtggaagttccagtgttctctcttattccacttcggtagaggatttctagtttcttgtgggctaattaaataaatcattaatactcttctaatggtctttgaataaagcctgagtaggaagtctaga

SEQ ID NO: 236 - DNA, 118 bp, Artificial Sequence
  3UTR-005 alpha-globin
gctgccttctgcggggcttgccttctggccatgcccttcttctctcccttgcacctgtacctcttggtctttgaataaagcctgagtaggaaggcggccgctcgagcatgcatctaga

SEQ ID NO: 237 - DNA, 908 bp, Artificial Sequence
  3UTR-006 G-CSF
gccaagccctccccatcccatgtatttatctctatttaatatttatgtctatttaagcctcatatttaaagacagggaagagcagaacggagccccaggcctctgtgtccttccctgcatttctgagtttcattctcctgcctgtagcagtgagaaaaagctcctgtcctcccatcccctggactgggaggtagataggtaaataccaagtatttattactatgactgctccccagccctggctctgcaatgggcactgggatgagccgctgtgagcccctggtcctgagggtccccacctgggacccttgagagtatcaggtctcccacgtgggagacaagaaatccctgtttaatatttaaacagcagtgttccccatctgggtccttgcacccctcactctggcctcagccgactgcacagcggcccctgcatccccttggctgtgaggcccctggacaagcagaggtggccagagctgggaggcatggccctggggtcccacgaatttgctggggaatctcgtttttcttcttaagacttttgggacatggtttgactcccgaacatcaccgacgcgtctcctgtttttctgggtggcctcgggacacctgccctgcccccacgagggtcaggactgtgactctttttagggccaggcaggtgcctggacatttgccttgctggacggggactggggatgtgggagggagcagacaggaggaatcatgtcaggcctgtgtgtgaaaggaagctccactgtcaccctccacctcttcaccccccactcaccagtgtcccctccactgtcacattgtaactgaacttcaggataataaagtgtttgcctccatggtctttgaataaagcctgagtaggaaggcggccgctcgagcatgcatctaga

SEQ ID NO: 238 - DNA, 835 bp, Artificial Sequence
  3UTR-007 Col1a2; collagen, type I, alpha 2
actcaatctaaattaaaaaagaaagaaatttgaaaaaactttctctttgccatttcttcttcttcttttttaactgaaagctgaatccttccatttcttctgcacatctacttgcttaaattgtgggcaaaagagaaaaagaaggattgatcagagcattgtgcaatacagtttcattaactccttcccccgctcccccaaaaatttgaatttttttttcaacactcttacacctgttatggaaaatgtcaacctttgtaagaaaaccaaaataaaaattgaaaaataaaaaccataaacatttgcaccacttgtggcttttgaatatcttccacagagggaagtttaaaacccaaacttccaaaggtttaaactacctcaaaacactttcccatgagtgtgatccacattgttaggtgctgacctagacagagatgaactgaggtccttgttttgttttgttcataatacaaaggtgctaattaatagtatttcagatacttgaagaatgttgatggtgctagaagaatttgagaagaaatactcctgtattgagttgtatcgtgtggtgtattttttaaaaaatttgatttagcattcatattttccatcttattcccaattaaaagtatgcagattatttgcccaaatcttcttcagattcagcatttgttctttgccagtctcattttcatcttcttccatggttccacagaagctttgtttcttgggcaagcagaaaaattaaattgtacctattttgtatatgtgagatgtttaaataaattgtgaaaaaaatgaaataaagcatgtttggttttccaaaagaacatat

SEQ ID NO: 239 - DNA, 297 bp, Artificial Sequence
  3UTR-008 Col6a2; collagen, type VI, alpha 2
cgccgccgcccgggccccgcagtcgagggtcgtgagcccaccccgtccatggtgctaagcgggcccgggtcccacacggccagcaccgctgctcactcggacgacgccctgggcctgcacctctccagctcctcccacggggtccccgtagccccggcccccgcccagccccaggtctccccaggccctccgcaggctgcccggcctccctccccctgcagccatcccaaggctcctgacctacctggcccctgagctctggagcaagccctgacccaataaaggctttgaacccat

SEQ ID NO: 240 - DNA, 602 bp, Artificial Sequence
  3UTR-009 RPN1; ribophorin I
ggggctagagccctctccgcacagcgtggagacggggcaaggaggggggttattaggattggtggttttgttttgctttgtttaaagccgtgggaaaatggcacaactttacctctgtgggagatgcaacactgagagccaaggggtgggagttgggataatttttatataaaagaagtttttccactttgaattgctaaaagtggcatttttcctatgtgcagtcactcctctcatttctaaaatagggacgtggccaggcacggtggctcatgcctgtaatcccagcactttgggaggccgaggcaggcggctcacgaggtcaggagatcgagactatcctggctaacacggtaaaaccctgtctctactaaaagtacaaaaaattagctgggcgtggtggtgggcacctgtagtcccagctactcgggaggctgaggcaggagaaaggcatgaatccaagaggcagagcttgcagtgagctgagatcacgccattgcactccagcctgggcaacagtgttaagactctgtctcaaatataaataaataaataaataaataaataaataaataaaaataaagcgagatgttgccctcaaa

SEQ ID NO: 241 - DNA, 785 bp, Artificial Sequence
  3UTR-010 LRP1; low density lipoprotein receptor-related protein 1
ggccctgccccgtcggactgcccccagaaagcctcctgccccctgccagtgaagtccttcagtgagcccctccccagccagcccttccctggccccgccggatgtataaatgtaaaaatgaaggaattacattttatatgtgagcgagcaagccggcaagcgagcacagtattatttctccatcccctccctgcctgctccttggcacccccatgctgccttcagggagacaggcagggagggcttggggctgcacctcctaccctcccaccagaacgcaccccactgggagagctggtggtgcagccttcccctccctgtataagacactttgccaaggctctcccctctcgccccatccctgcttgcccgctcccacagcttcctgagggctaattctgggaagggagagttctttgctgcccctgtctggaagacgtggctctgggtgaggtaggcgggaaaggatggagtgttttagttcttgggggaggccaccccaaaccccagccccaactccaggggcacctatgagatggccatgctcaacccccctcccagacaggccctccctgtctccagggcccccaccgaggttcccagggctggagacttcctctggtaaacattcctccagcctcccctcccctggggacgccaaggaggtgggccacacccaggaagggaaagcgggcagccccgttttggggacgtgaacgttttaataatttttgctgaattcctttacaactaaataacacagatattgttataaataaaattgt

SEQ ID NO: 242 - DNA, 3001 bp, Artificial Sequence
  3UTR-011 Nnt1; cardiotrophin-like cytokine factor 1
atattaaggatcaagctgttagctaataatgccacctctgcagttttgggaacaggcaaataaagtatcagtatacatggtgatgtacatctgtagcaaagctcttggagaaaatgaagactgaagaaagcaaagcaaaaactgtatagagagatttttcaaaagcagtaatccctcaattttaaaaaaggattgaaaattctaaatgtctttctgtgcatattttttgtgttaggaatcaaaagtattttataaaaggagaaagaacagcctcattttagatgtagtcctgttggattttttatgcctcctcagtaaccagaaatgttttaaaaaactaagtgtttaggatttcaagacaacattatacatggctctgaaatatctgacacaatgtaaacattgcaggcacctgcattttatgttttttttttcaacaaatgtgactaatttgaaacttttatgaacttctgagctgtccccttgcaattcaaccgcagtttgaattaatcatatcaaatcagttttaattttttaaattgtacttcagagtctatatttcaagggcacattttctcactactattttaatacattaaaggactaaataatctttcagagatgctggaaacaaatcatttgctttatatgtttcattagaataccaatgaaacatacaacttgaaaattagtaatagtatttttgaagatcccatttctaattggagatctctttaatttcgatcaacttataatgtgtagtactatattaagtgcacttgagtggaattcaacatttgactaataaaatgagttcatcatgttggcaagtgatgtggcaattatctctggtgacaaaagagtaaaatcaaatatttctgcctgttacaaatatcaaggaagacctgctactatgaaatagatgacattaatctgtcttcactgtttataatacggatggattttttttcaaatcagtgtgtgttttgaggtcttatgtaattgatgacatttgagagaaatggtggctttttttagctacctctttgttcatttaagcaccagtaaagatcatgtctttttatagaagtgtagattttctttgtgactttgctatcgtgcctaaagctctaaatataggtgaatgtgtgatgaatactcagattatttgtctctctatataattagtttggtactaagtttctcaaaaaattattaacacatgaaagacaatctctaaaccagaaaaagaagtagtacaaattttgttactgtaatgctcgcgtttagtgagtttaaaacacacagtatcttttggttttataatcagtttctattttgctgtgcctgagattaagatctgtgtatgtgtgtgtgtgtgtgtgtgcgtttgtgtgttaaagcagaaaagacttttttaaaagttttaagtgataaatgcaatttgttaattgatcttagatcactagtaaactcagggctgaattataccatgtatattctattagaagaaagtaaacaccatctttattcctgccctttttcttctctcaaagtagttgtagttatatctagaaagaagcaattttgatttcttgaaaaggtagttcctgcactcagtttaaactaaaaataatcatacttggattttatttatttttgtcatagtaaaaattttaatttatatatatttttatttagtattatcttattctttgctatttgccaatcctttgtcatcaattgtgttaaatgaattgaaaattcatgccctgttcattttattttactttattggttaggatatttaaaggatttttgtatatataatttcttaaattaatattccaaaaggttagtggacttagattataaattatggcaaaaatctaaaaacaacaaaaatgatttttatacattctatttcattattcctctttttccaataagtcatacaattggtagatatgacttattttatttttgtattattcactatatctttatgatatttaagtataaataattaaaaaaatttattgtaccttatagtctgtcaccaaaaaaaaaaaattatctgtaggtagtgaaatgctaatgttgatttgtctttaagggcttgttaactatcctttattttctcatttgtcttaaattaggagtttgtgtttaaattactcatctaagcaaaaaatgtatataaatcccattactgggtatatacccaaaggattataaatcatgctgctataaagacacatgcacacgtatgtttattgcagcactattcacaatagcaaagacttggaaccaacccaaatgtccatcaatgatagacttgattaagaaaatgtgcacatatacaccatggaatactatgcagccataaaaaaggatgagttcatgtcctttgtagggacatggataaagctggaaaccatcattctgagcaaactattgcaaggacagaaaaccaaacactgcatgttctcactcataggtgggaattgaacaatgagaacacttggacacaaggtggggaacaccacacaccagggcctgtcatggggtggggggagtggggagggatagcattaggagatatacctaatgtaaatgatgagttaatgggtgcagcacaccaacatggcacatgtatacatatgtagcaaacctgcacgttgtgcacatgtaccctagaacttaaagtataattaaaaaaaaaaagaaaacagaagctatttataaagaagttatttgctgaaataaatgtgatctttcccattaaaaaaataaagaaattttggggtaaaaaaacacaatatattgtattcttgaaaaattctaagagagtggatgtgaagtgttctcaccacaaaagtgataactaattgaggtaatgcacatattaattagaaagattttgtcattccacaatgtatatatacttaaaaatatgttatacacaataaatacatacattaaaaaataagtaaatgta

SEQ ID NO: 243 - DNA, 1037 bp, Artificial Sequence
  3UTR-012 Col6a1; collagen, type VI, alpha 1
cccaccctgcacgccggcaccaaaccctgtcctcccacccctccccactcatcactaaacagagtaaaatgtgatgcgaattttcccgaccaacctgattcgctagattttttttaaggaaaagcttggaaagccaggacacaacgctgctgcctgctttgtgcagggtcctccggggctcagccctgagttggcatcacctgcgcagggccctctggggctcagccctgagctagtgtcacctgcacagggccctctgaggctcagccctgagctggcgtcacctgtgcagggccctctggggctcagccctgagctggcctcacctgggttccccaccccgggctctcctgccctgccctcctgcccgccctccctcctgcctgcgcagctccttccctaggcacctctgtgctgcatcccaccagcctgagcaagacgccctctcggggcctgtgccgcactagcctccctctcctctgtccccatagctggtttttcccaccaatcctcacctaacagttactttacaattaaactcaaagcaagctcttctcctcagcttggggcagccattggcctctgtctcgttttgggaaaccaaggtcaggaggccgttgcagacataaatctcggcgactcggccccgtctcctgagggtcctgctggtgaccggcctggaccttggccctacagccctggaggccgctgctgaccagcactgaccccgacctcagagagtactcgcaggggcgctggctgcactcaagaccctcgagattaacggtgctaaccccgtctgctcctccctcccgcagagactggggcctggactggacatgagagccccttggtgccacagagggctgtgtcttactagaaacaacgcaaacctctccttcctcagaatagtgatgtgttcgacgttttatcaaaggccccctttctatgttcatgttagttttgctccttctgtgtttttttctgaaccatatccatgttgctgacttttccaaataaaggttttcactcctctc

SEQ ID NO: 244 - DNA, 577 bp, Artificial Sequence
  3UTR-013 Calr; calreticulin
agaggcctgcctccagggctggactgaggcctgagcgctcctgccgcagagctggccgcgccaaataatgtctctgtgagactcgagaactttcatttttttccaggctggttcggatttggggtggattttggttttgttcccctcctccactctcccccaccccctccccgcccttttttttttttttttttaaactggtattttatctttgattctccttcagccctcacccctggttctcatctttcttgatcaacatcttttcttgcctctgtccccttctctcatctcttagctcccctccaacctggggggcagtggtgtggagaagccacaggcctgagatttcatctgctctccttcctggagcccagaggagggcagcagaagggggtggtgtctccaaccccccagcactgaggaagaacggggctcttctcatttcacccctccctttctcccctgcccccaggactgggccacttctgggtggggcagtgggtcccagattggctcacactgagaatgtaagaactacaaacaaaatttctattaaattaaattttgtgtctcc

SEQ ID NO: 245 - DNA, 2212 bp, Artificial Sequence
  3UTR-014 Col1a1; collagen, type I, alpha 1
ctccctccatcccaacctggctccctcccacccaaccaactttccccccaacccggaaacagacaagcaacccaaactgaaccccctcaaaagccaaaaaatgggagacaatttcacatggactttggaaaatatttttttcctttgcattcatctctcaaacttagtttttatctttgaccaaccgaacatgaccaaaaaccaaaagtgcattcaaccttaccaaaaaaaaaaaaaaaaaaagaataaataaataactttttaaaaaaggaagcttggtccacttgcttgaagacccatgcgggggtaagtccctttctgcccgttgggcttatgaaaccccaatgctgccctttctgctcctttctccacaccccccttggggcctcccctccactccttcccaaatctgtctccccagaagacacaggaaacaatgtattgtctgcccagcaatcaaaggcaatgctcaaacacccaagtggcccccaccctcagcccgctcctgcccgcccagcacccccaggccctgggggacctggggttctcagactgccaaagaagccttgccatctggcgctcccatggctcttgcaacatctccccttcgtttttgagggggtcatgccgggggagccaccagcccctcactgggttcggaggagagtcaggaagggccacgacaaagcagaaacatcggatttggggaacgcgtgtcaatcccttgtgccgcagggctgggcgggagagactgttctgttccttgtgtaactgtgttgctgaaagactacctcgttcttgtcttgatgtgtcaccggggcaactgcctgggggcggggatgggggcagggtggaagcggctccccattttataccaaaggtgctacatctatgtgatgggtggggtggggagggaatcactggtgctatagaaattgagatgcccccccaggccagcaaatgttcctttttgttcaaagtctatttttattccttgatatttttctttttttttttttttttttgtggatggggacttgtgaatttttctaaaggtgctatttaacatgggaggagagcgtgtgcggctccagcccagcccgctgctcactttccaccctctctccacctgcctctggcttctcaggcctctgctctccgacctctctcctctgaaaccctcctccacagctgcagcccatcctcccggctccctcctagtctgtcctgcgtcctctgtccccgggtttcagagacaacttcccaaagcacaaagcagtttttccccctaggggtgggaggaagcaaaagactctgtacctattttgtatgtgtataataatttgagatgtttttaattattttgattgctggaataaagcatgtggaaatgacccaaacataatccgcagtggcctcctaatttccttctttggagttgggggaggggtagacatggggaaggggctttggggtgatgggcttgccttccattcctgccctttccctccccactattctcttctagatccctccataaccccactcccctttctctcacccttcttataccgcaaacctttctacttcctctttcattttctattcttgcaatttccttgcaccttttccaaatcctcttctcccctgcaataccatacaggcaatccacgtgcacaacacacacacacactcttcacatctggggttgtccaaacctcatacccactccccttcaagcccatccactctccaccccctggatgccctgcacttggtggcggtgggatgctcatggatactgggagggtgaggggagtggaacccgtgaggaggacctgggggcctctccttgaactgacatgaagggtcatctggcctctgctcccttctcacccacgctgacctcctgccgaaggagcaacgcaacaggagaggggtctgctgagcctggcgagggtctgggagggaccaggaggaaggcgtgctccctgctcgctgtcctggccctgggggagtgagggagacagacacctgggagagctgtggggaaggcactcgcaccgtgctcttgggaaggaaggagacctggccctgctcaccacggactgggtgcctcgacctcctgaatccccagaacacaacccccctgggctggggtggtctggggaaccatcgtgcccccgcctcccgcctactcctttttaagctt

SEQ ID NO: 246 - DNA, 729 bp, Artificial Sequence
  3UTR-015 Plod1; procollagen-lysine, 2-oxoglutarate 5-dioxygenase 1
ttggccaggcctgaccctcttggacctttcttctttgccgacaaccactgcccagcagcctctgggacctcggggtcccagggaacccagtccagcctcctggctgttgacttcccattgctcttggagccaccaatcaaagagattcaaagagattcctgcaggccagaggcggaacacacctttatggctggggctctccgtggtgttctggacccagcccctggagacaccattcacttttactgctttgtagtgactcgtgctctccaacctgtcttcctgaaaaaccaaggcccccttcccccacctcttccatggggtgagacttgagcagaacaggggcttccccaagttgcccagaaagactgtctgggtgagaagccatggccagagcttctcccaggcacaggtgttgcaccagggacttctgcttcaagttttggggtaaagacacctggatcagactccaagggctgccctgagtctgggacttctgcctccatggctggtcatgagagcaaaccgtagtcccctggagacagcgactccagagaacctcttgggagacagaagaggcatctgtgcacagctcgatcttctacttgcctgtggggaggggagtgacaggtccacacaccacactgggtcaccctgtcctggatgcctctgaagagagggacagaccgtcagaaactggagagtttctattaaaggtcatttaaacca

SEQ ID NO: 247 - DNA, 847 bp, Artificial Sequence
  3UTR-016 Nucb1; nucleobindin 1
tcctccgggaccccagccctcaggattcctgatgctccaaggcgactgatgggcgctggatgaagtggcacagtcagcttccctgggggctggtgtcatgttgggctcctggggcgggggcacggcctggcatttcacgcattgctgccaccccaggtccacctgtctccactttcacagcctccaagtctgtggctcttcccttctgtcctccgaggggcttgccttctctcgtgtccagtgaggtgctcagtgatcggcttaacttagagaagcccgccccctccccttctccgtctgtcccaagagggtctgctctgagcctgcgttcctaggtggctcggcctcagctgcctgggttgtggccgccctagcatcctgtatgcccacagctactggaatccccgctgctgctccgggccaagcttctggttgattaatgagggcatggggtggtccctcaagaccttcccctaccttttgtggaaccagtgatgcctcaaagacagtgtcccctccacagctgggtgccaggggcaggggatcctcagtatagccggtgaaccctgataccaggagcctgggcctccctgaacccctggcttccagccatctcatcgccagcctcctcctggacctcttggcccccagccccttccccacacagccccagaagggtcccagagctgaccccactccaggacctaggcccagcccctcagcctcatctggagcccctgaagaccagtcccacccacctttctggcctcatctgacactgctccgcatcctgctgtgtgtcctgttccatgttccggttccatccaaatacactttctggaacaaa

SEQ ID NO: 248 - DNA, 110 bp, Artificial Sequence
  3UTR-017 alpha-globin
gctggagcctcggtggccatgcttcttgccccttgggcctccccccagcccctcctccccttcctgcacccgtacccccgtggtctttgaataaagtctgagtgggcggc

SEQ ID NO: 249 - DNA, 2461 bp, Artificial Sequence
  polynucleotide sequence encoding human MCM
tcaagcttttggaccctcgtacagaagctaatacgactcactatagggaaataagagagaaaagaagagtaagaagaaatataagagccaccatgttaagagctaagaatcagctttttttactttcacctcattacctgaggcaggtaaaagaatcatcaggctccaggctcatacagcaacgacttctacaccagcaacagccccttcacccagaatgggctgccctggctaaaaagcagctgaaaggcaaaaacccagaagacctaatatggcacaccccggaagggatctctataaaacccttgtattccaagagagatactatggacttacctgaagaacttccaggagtgaagccattcacacgtggaccatatcctaccatgtatacctttaggccctggaccatccgccagtatgctggttttagtactgtggaagaaagcaataagttctataaggacaacattaaggctggtcagcagggattatcagttgcctttgatctggcgacacatcgtggctatgattcagacaaccctcgagttcgtggtgatgttggaatggctggagttgctattgacactgtggaagataccaaaattctttttgatggaattcctttagaaaaaatgtcagtttccatgactatgaatggagcagttattccagttcttgcaaattttatagtaactggagaagaacaaggtgtacctaaagagaagcttactggtaccatccaaaatgatatactaaaggaatttatggttcgaaatacatacatttttcctccagaaccatccatgaaaattattgctgacatatttgaatatacagcaaagcacatgccaaaatttaattcaatttcaattagtggataccatatgcaggaagcaggggctgatgccattctggagctggcctatactttagcagatggattggagtactccagaactggactccaggctggcctgacaattgatgaatttgcaccaaggttgtctttcttctggggaattggaatgaatttctatatggaaatagcaaagatgagagctggtagaagactctgggctcacttaatagagaaaatgtttcagcctaaaaactcaaaatctcttcttctaagagcacactgtcagacatctggatggtcacttactgagcaggatccctacaataatattgtccgtactgcaatagaagcaatggcagcagtatttggagggactcagtctttgcacacaaattcttttgatgaagctttgggtttgccaactgtgaaaagtgctcgaattgccaggaacacacaaatcatcattcaagaagaatctgggattcccaaagtggctgatccttggggaggttcttacatgatggaatgtctcacaaatgatgtttatgatgctgctttaaagctcattaatgaaattgaagaaatgggtggaatggccaaagctgtagctgagggaatacctaaacttcgaattgaagaatgtgctgcccgaagacaagctagaatagattctggttctgaagtaattgttggagtaaataagtaccagttggaaaaagaagacgctgtagaagttctggcaattgataatacttcagtgcgaaacaggcagattgaaaaacttaagaagatcaaatccagcagggatcaagctttggctgaacgttgtcttgctgcactaaccgaatgtgctgctagcggagatggaaatatcctggctcttgcagtggatgcatctcgggcaagatgtacagtgggagaaatcacagatgccctgaaaaaggtatttggtgaacataaagcgaatgatcgaatggtgagtggagcatatcgccaggaatttggagaaagtaaagagataacatctgctatcaagagggttcataaattcatggaacgtgaaggtcgcagacctcgtcttcttgtagcaaaaatgggacaagatggccatgacagaggagcaaaagttattgctacaggatttgctgatcttggttttgatgtggacataggccctcttttccagactcctcgtgaagtggcccagcaggctgtggatgcggatgtgcatgctgtgggcgtaagcaccctcgctgctggtcataaaaccctagttcctgaactcatcaaagaacttaactcccttggacggccagatattcttgtcatgtgtggaggggtgataccacctcaggattatgaatttctgtttgaagttggtgtttccaatgtatttggtcctgggactcgaattccaaaggctgccgttcaggtgcttgatgatattgagaagtgtttggaaaagaagcagcaatctgtatgataataggctggagcctcggtggccatgcttcttgccccttgggcctccccccagcccctcctccccttcctgcacccgtacccccgtggtctttgaataaagtctgagtgggcggc

SEQ ID NO: 250 - DNA, 2455 bp, Artificial Sequence
  polynucleotide sequence encoding mouse MCM
tcaagcttttggaccctcgtacagaagctaatacgactcactatagggaaataagagagaaaagaagagtaagaagaaatataagagccaccatgttgagagctaagaatcaactttttttgctatcgccccattacctgaagcagctaaacattccatcagcttccagatggaaacgccttctacaccagcagcaaccccttcacccagaatgggctgtactggccaaaaagcagctgaaaggcaaaaacccagaggaccttatatggcacaccccagaagggatctctataaagcccctatattccagggcagatactctggacttacccgaagaacttccaggagtgaagccattcacacggggaccatatcctaccatgtatacctataggccctggaccatccgtcagtatgcaggctttagtactgtggaagaaagcaataaattctataaggacaatattaaggctggtcagcaggggttgtctgttgcctttgacttggcaacacatcgtggttatgattcagacaaccccagagttcgtggagatgttggaatggctggagttgctattgacactgtagaagacaccaaaatcctatttgatggcattcctttagaaaaaatgtccgtttccatgactatgaacggagctgtcatcccagtcctggcaacatttatagtaactggggaagagcaaggtgtgccgaaggagaagctcactggcacaattcagaatgacatcctaaaggagtttatggtcagaaatacttatatttttcccccagagccatcgatgaaaattattgctgacattttccaatacacagcacagcacatgccaaaatttaattccatttcgattagcgggtaccatatgcaggaagcaggagctgatgccattttagaactggcctataccatcgcagatgggttggagtactgcagaactggactccaggctggactcacaattgatgaatttgcaccaaggttgtctttcttctggggaattggaatgaacttctacatggaaatagccaagatgcgagctgggagaagactgtgggctcacttaatagaaaaaatgttccagcctaaaaactctaaatctcttcttctaagagcacactgccagacatcggggtggtcacttactgagcaggatccttacaataacattgtccgcactgcaatcgaagccatggcagctgtgtttggaggaacccagtctttgcatacgaactcttttgatgaagcgctgggtttgcccactgtgaaaagtgcccggattgctcggaacacacagatcatcattcaggaagaatctgggatccccaaagtggcggatccttggggagggtcgtacatgatggagtcgctcacaaatgacgtttatgaggctgctctgaagttgatatatgaagttgaagaaatgggtggaatggccaaagctgtagctgaaggaatccctaaacttcgcattgaagaatgtgctgcccgaagacaagctagaatagattctggttctgaggtaattgttggagtaaataagtatcagttggaaaaagaagactctgtggaggtcctggccattgacaacacttcagtgcgtaagaagcagattgaaaaactcaagaagattaaatccagcagggatcaagctttggctgagcagtgtctcagtgcacttacccagtgtgctgccagtggagatggcaatattctggctctggcagtggatgcagctcgtgcaagatgtacagttggagaaatcacggatgccttgaaaaaagtatttggtgagcataaagctaatgatcgtatggtgagtggagcatatcggcaggagtttggagaaagtaaagagatcacatctgccatcaagagagttaataaattcatggaacgtgaaggtcgcagacctcgtcttcttgtggcaaaaatgggacaagatggccatgacaggggagccaaggtcattgctacaggatttgctgatcttggttttgatgtggacataggccctctttttcagactccccgtgaagtggcgcagcaagctgtggatgcagatgtccatgctgtgggtgtcagcacacttgctgctggtcataaaaccctcgttcctgagcttatcaaagaactcaccgccctggggcggccagatatccttgtcatgtgtgggggcgtgattccaccacaggattatgaatttctgtatgaagttggtgtttccaacgtctttggtcctggaacccggattccaagagctgctgtccaagtgcttgatgatattgagaagtgtttggcagagaagcagcagtctgtgtgataataggctggagcctcggtggccatgcttcttgccccttgggcctccccccagcccctcctccccttcctgcacccgtacccccgtggtctttgaataaagtctgagtgggcggc

SEQ ID NO: 251 - protein, 25 aa, Artificial Sequence
  mitochondrial targeting peptides
MLSLRQSIRFFKPATRTLCSSRYLL

SEQ ID NO: 252 - protein, 16 aa, Artificial Sequence
  mitochondrial targeting peptides
MALLRGVFVVAAKRTP

SEQ ID NO: 253 - protein, 23 aa, Artificial Sequence
  mitochondrial targeting peptides
MLRIPVRKALVGLSKSSKGCVRT

SEQ ID NO: 254 - protein, 31 aa, Artificial Sequence
  mitochondrial targeting peptide
MRQPAVRLVRLGRVPYAELLGLQDRWLRRLQ

SEQ ID NO: 255 - protein, 11 aa, Artificial Sequence
  mitochondrial targeting peptides
METWRKGSFRN

SEQ ID NO: 256 - protein, 28 aa, Artificial Sequence
  mitochondrial targeting peptides
MAALRRMLHLPSLMMGTCRPFAGSLADS

SEQ ID NO: 257 - protein, 33 aa, Artificial Sequence
  mitochondrial targeting peptides
MLLWPLRGWAARALRCFGPGSRGSPASGPGPRR

SEQ ID NO: 258 - protein, 34 aa, Artificial Sequence
  mitochondrial targeting peptides
MRCLTTPMLLRALAQAARAGPPGGRSLHSSAVAA

SEQ ID NO: 259 - protein, 53 aa, Artificial Sequence
  mitochondrial targeting peptides
MAASWRLGCDPRLLRYLVGFPGRRSVGLVKGALGWSVSRGANWRWFHSTQWLR

SEQ ID NO: 260 - protein, 41 aa, Artificial Sequence
  mitochondrial targeting peptides
MSALCWGRGAAGLKRALRPCGRPGLPGKEGTAGGVCGPRRS

SEQ ID NO: 261 - protein, 33 aa, Artificial Sequence
  mitochondrial targeting peptides
MGGLFWRSALRGLRCGPRAPGPSLLVRHGSGGP

SEQ ID NO: 262 - protein, 56 aa, Artificial Sequence
  mitochondrial targeting peptides
MAVLWRLSAVCGALGGRALLLRTPVVRPAHISAFLQDRPIPEWCGVQHIHLSPSHH

SEQ ID NO: 263 - protein, 55 aa, Artificial Sequence
  mitochondrial targeting peptides
MYYKFSGFTQKLAGAWASEAYSPQGLKPVVSTEAPPIIFATPTKLTSDSTVYDYA

SEQ ID NO: 264 - protein, 30 aa, Artificial Sequence
  Mouse methylmalonyl-CoA mutase
MLRAKNQLFLLSPHYLKQLNIPSASRWKRL

SEQ ID NO: 265 - protein, 32 aa, Artificial Sequence
  Human methylmalonyl-CoA mutase
MLRAKNQLFLLSPHYLRQVKESSGSRLIQQRL

SEQ ID NO: 266 - DNA, 92 bp, Artificial Sequence
  5UTR-018 Upstream UTR
tcaagcttttggaccctcgtacagaagctaatacgactcactatagggaaataagagagaaaagaagagtaagaagaaatataagagccacc

SEQ ID NO: 267 - DNA, 119 bp, Artificial Sequence
  3UTR-018
tgataataggctggagcctcggtggccatgcttcttgccccttgggcctccccccagcccctcctccccttcctgcacccgtacccccgtggtctttgaataaagtctgagtgggcggc

SEQ ID NO: 268 - protein, 748 aa, Artificial Sequence
  mouse MCM
MLRAKNQLFLLSPHYLKQLNIPSASRWKRLLHQQQPLHPEWAVLAKKQLKGKNPEDLIWHTPEGISIKPLYSRADTLDLPEELPGVKPFTRGPYPTMYTYRPWTIRQYAGFSTVEESNKFYKDNIKAGQQGLSVAFDLATHRGYDSDNPRVRGDVGMAGVAIDTVEDTKILFDGIPLEKMSVSMTMNGAVIPVLATFIVTGEEQGVPKEKLTGTIQNDILKEFMVRNTYIFPPEPSMKIIADIFQYTAQHMPKFNSISISGYHMQEAGADAILELAYTIADGLEYCRTGLQAGLTIDEFAPRLSFFWGIGMNFYMEIAKMRAGRRLWAHLIEKMFQPKNSKSLLLRAHCQTSGWSLTEQDPYNNIVRTAIEAMAAVFGGTQSLHTNSFDEALGLPTVKSARIARNTQIIIQEESGIPKVADPWGGSYMMESLTNDVYEAALKLIYEVEEMGGMAKAVAEGIPKLRIEECAARRQARIDSGSEVIVGVNKYQLEKEDSVEVLAIDNTSVRKKQIEKLKKIKSSRDQALAEQCLSALTQCAASGDGNILALAVDAARARCTVGEITDALKKVFGEHKANDRMVSGAYRQEFGESKEITSAIKRVNKFMEREGRRPRLLVAKMGQDGHDRGAKVIATGFADLGFDVDIGPLFQTPREVAQQAVDADVHAVGVSTLAAGHKTLVPELIKELTALGRPDILVMCGGVIPPQDYEFLYEVGVSNVFGPGTRIPRAAVQVLDDIEKCLAEKQQSV

SEQ ID NO: 269 - protein, 239 aa, Artificial Sequence
  GFP sequence
MVSKGEELFTGVVPILVELDGDVNGHKFSVSGEGEGDATYGKLTLKFICTTGKLPVPWPTLVTTLTYGVQCFSRYPDHMKQHDFFKSAMPEGYVQERTIFFKDDGNYKTRAEVKFEGDTLVNRIELKGIDFKEDGNILGHKLEYNYNSHNVYIMADKQKNGIKVNFKIRHNIEDGSVQLADHYQQNTPIGDGPVLLPDNHYLSTQSALSKDPNEKRDHMVLLEFVTAAGITLGMDELYK

SEQ ID NO: 270 - protein, 68 aa, Artificial Sequence
  O14561 mitochondrial targeting peptide
MASRVLSAYVSRLPAAFAPLPRVRMLAVARPLSTALCSAGTQTRLGTLQPALVLAQVPGRVTQLCRQY

SEQ ID NO: 271 - protein, 30 aa, Artificial Sequence
  O14874 mitochondrial targeting peptide
MILASVLRSGPGGGLPLRPLLGPALALRAR

SEQ ID NO: 272 - protein, 45 aa, Artificial Sequence
  O15091mitochondrial targeting peptide
MTFYLFGIRSFPKLWKSPYLGLGPGHSYVSLFLADRCGIRNQQRL

SEQ ID NO: 273 - protein, 29 aa, Artificial Sequence
  O15235 mitochondrial targeting peptide
MSWSGLLHGLNTSLTCGPALVPRLWATCS

SEQ ID NO: 274 - protein, 27 aa, Artificial Sequence
  O15382 mitochondrial targeting peptide
MAAAALGQIWARKLLSVPWLLCGPRRY

SEQ ID NO: 275 - protein, 42 aa, Artificial Sequence
  O43181 mitochondrial targeting peptide
MAAVSMSVVLRQTLWRRRAVAVAALSVSRVPTRSLRTSTWRL

SEQ ID NO: 276 - protein, 31 aa, Artificial Sequence
  O43464 mitochondrial targeting peptide
MAAPRAGRGAGWSLRAWRALGGIRWGRRPRL

SEQ ID NO: 277 - protein, 28 aa, Artificial Sequence
  O43572 mitochondrial targeting peptide
MRGAGPSPRQSPRTLRPDPGPAMSFFRR

SEQ ID NO: 278 - protein, 46 aa, Artificial Sequence
  O43674 mitochondrial targeting peptide
MAAMSLLRRVSVTAVAALSGRPLGTRLGFGGFLTRGFPKAAAPVRH

SEQ ID NO: 279 - protein, 27 aa, Artificial Sequence
  O43677  mitochondrial targeting peptide
MAPSALLRPLSRLLAPARLPSGPSVRS

SEQ ID NO: 280 - protein, 27 aa, Artificial Sequence
  O43766 mitochondrial targeting peptide
MSLRCGDAARTLGPRVFGRYFCSPVRP

SEQ ID NO: 281 - protein, 41 aa, Artificial Sequence
  O43819 mitochondrial targeting peptide
MLLLTRSPTAWHRLSQLKPRVLPGTLGGQALHLRSWLLSRQ

SEQ ID NO: 282 - protein, 34 aa, Artificial Sequence
  O43837 mitochondrial targeting peptide
MAALSGVRWLTRALVSAGNPGAWRGLSTSAAAHA

SEQ ID NO: 283 - protein, 87 aa, Artificial Sequence
  O60313 mitochondrial targeting peptide
MWRLRRAAVACEVCQSLVKHSSGIKGSLPLQKLHLVSRSIYHSHHPTLKLQRPQLRTSFQQFSSLTNLPLRKLKFSPIKYGYQPRRN

SEQ ID NO: 284 - protein, 23 aa, Artificial Sequence
  O60397 mitochondrial targeting peptide
MLWNLLALHQIGQRTISTASHRH

SEQ ID NO: 285 - protein, 22 aa, Artificial Sequence
  O75027 mitochondrial targeting peptide
MALLAMHSWRWAAAAAAFEKRR

SEQ ID NO: 286 - protein, 44 aa, Artificial Sequence
  O75208 mitochondrial targeting peptide
MAAAAVSGALGRAGWRLLQLRCLPVARCRQALVPRAFHASAVGL

SEQ ID NO: 287 - protein, 38 aa, Artificial Sequence
  O75251 mitochondrial targeting peptide
MAVLSAPGLRGFRILGLRSSVGPAVQARGVHQSVATDG

SEQ ID NO: 288 - protein, 33 aa, Artificial Sequence
  O75306 mitochondrial targeting peptide
MAALRALCGFRGVAAQVLRPGAGVRLPIQPSRG

SEQ ID NO: 289 - protein, 28 aa, Artificial Sequence
  O75380 mitochondrial targeting peptide
MAAAMTFCRLLNRCGEAARSLPLGARCF

SEQ ID NO: 290 - protein, 27 aa, Artificial Sequence
  O75390 mitochondrial targeting peptide
MALLTAAARLLGTKNASCLVLAARHAS

SEQ ID NO: 291 - protein, 45 aa, Artificial Sequence
  O75439 mitochondrial targeting peptide
MAAAAARVVLSSAARRRLWGFSESLLIRGAAGRSLYFGENRLRST

SEQ ID NO: 292 - protein, 36 aa, Artificial Sequence
  O75489 mitochondrial targeting peptide
MAAAAVARLWWRGILGASALTRGTGRPSVLLLPVRR

SEQ ID NO: 293 - protein, 38 aa, Artificial Sequence
  O75521 mitochondrial targeting peptide
MAMAYLAWRLARRSCPSSLQVTSFPVVQLHMNRTAMRA

SEQ ID NO: 294 - protein, 21 aa, Artificial Sequence
  O75600 mitochondrial targeting peptide
MWPGNAWRAALFWVPRGRRAQ

SEQ ID NO: 295 - protein, 43 aa, Artificial Sequence
  O75616 mitochondrial targeting peptide
MAAPSWRGARLVQSVLRVWQVGPHVARERVIPFSSLLGFQRRC

SEQ ID NO: 296 - protein, 30 aa, Artificial Sequence
  O75879 mitochondrial targeting peptide
MAAPMLRWGCRGRRWAFARVDGGSCHRRGA

SEQ ID NO: 297 - protein, 56 aa, Artificial Sequence
  O76031 mitochondrial targeting peptide
MPSCGACTCGAAAVRLITSSLASAQRGISGGRIHMSVLGRLGTFETQILQRAPLRS

SEQ ID NO: 298 - protein, 16 aa, Artificial Sequence
  O94925 mitochondrial targeting peptide
MMRLRGSGMLRDLLLR

SEQ ID NO: 299 - protein, 28 aa, Artificial Sequence
  O95169 mitochondrial targeting peptide
MAVARAGVLGVQWLQRASRNVMPLGART

SEQ ID NO: 300 - protein, 33 aa, Artificial Sequence
  O95178 mitochondrial targeting peptide
MSALTRLASFARVGGRLFRSGCARTAGDGGVRH

SEQ ID NO: 301 - protein, 115 aa, Artificial Sequence
  O95202 mitochondrial targeting peptide
MASILLRSCRGRAPARLPPPPRYTVPRGSPGDPAHLSCASTLGLRNCLNVPFGCCTPIHPVYTSSRGDHLGCWALRPECLRIVSRAPWTSTSVGFVAVGPQCLPVRGWHSSRPVR

SEQ ID NO: 302 - protein, 35 aa, Artificial Sequence
  O95299 mitochondrial targeting peptide
MALRLLKLAATSASARVVAAGAQRVRGIHSSVQCK

SEQ ID NO: 303 - protein, 7 aa, Artificial Sequence
  O95571 mitochondrial targeting peptide
MAEAVLR

SEQ ID NO: 304 - protein, 39 aa, Artificial Sequence
  O95822 mitochondrial targeting peptide
MRGFGPGLTARRLLPLRLPPRPPGPRLASGQAAGALERA

SEQ ID NO: 305 - protein, 54 aa, Artificial Sequence
  O95831 mitochondrial targeting peptide
MFRCGGLAAGALKQKLVPLVRTVCVRSPRQRNRLPGNLFQRWHVPLELQMTRQM

SEQ ID NO: 306 - protein, 53 aa, Artificial Sequence
  P00367 mitochondrial targeting peptide
MYRYLGEALLLSRAGPAALGSASADSAALLGWARGQPAAAPQPGLALAARRHY

SEQ ID NO: 307 - protein, 43 aa, Artificial Sequence
  P00390 mitochondrial targeting peptide
MALLPRALSAGAGPSWRRAARAFRGFLLLLPEPAALTRALSRA

SEQ ID NO: 308 - protein, 32 aa, Artificial Sequence
  P00480 mitochondrial targeting peptide
MLFNLRILLNNAAFRNGHNFMVRNFRCGQPLQ

SEQ ID NO: 309 - protein, 29 aa, Artificial Sequence
  P00505 mitochondrial targeting peptide
MALLHSGRVLPGIAAAFHPGLAAAASARA

SEQ ID NO: 310 - protein, 24 aa, Artificial Sequence
  P04179 mitochondrial targeting peptide
MLSRAVCGTSRQLAPALGYLGSRQ

SEQ ID NO: 311 - protein, 35 aa, Artificial Sequence
  P04181 (25) mitochondrial targeting peptide
MFSKLAHLQRFAVLSRGVHSSVASATSVATKKTVQ

SEQ ID NO: 312 - protein, 25 aa, Artificial Sequence
  P04181 (35) mitochondrial targeting peptide
MFSKLAHLQRFAVLSRGVHSSVASA

SEQ ID NO: 313 - protein, 17 aa, Artificial Sequence
  P05091 mitochondrial targeting peptide
MLRAAARFGPRLGRRLL

SEQ ID NO: 314 - protein, 39 aa, Artificial Sequence
  P05108 mitochondrial targeting peptide
MLAKGLPPRSVLVKGCQTFLSAPREGLGRLRVPTGEGAG

SEQ ID NO: 315 - protein, 52 aa, Artificial Sequence
  P05165 mitochondrial targeting peptide
MAGFWVGTAPLVAAGRRGRWPPQQLMLSAALRTLKHVLYYSRQCLMVSRNLG

SEQ ID NO: 316 - protein, 28 aa, Artificial Sequence
  P05166 mitochondrial targeting peptide
MAAALRVAAVGARLSVLASGLRAAVRSL

SEQ ID NO: 317 - protein, 61 aa, Artificial Sequence
  P05496 mitochondrial targeting peptide
MQTAGALFISPALIRCCTRGLIRPVSASFLNSPVNSSKQPSYSNFPLQVARREFQTSVVSR

SEQ ID NO: 318 - protein, 47 aa, Artificial Sequence
  P06576 mitochondrial targeting peptide
MLGFVGRVAAAPASGALRRLTPSASLPPAQLLLRAAPTAVHPVRDYA

SEQ ID NO: 319 - protein, 13 aa, Artificial Sequence
  P07919 mitochondrial targeting peptide
MGLEDEQKMLTES

SEQ ID NO: 320 - protein, 44 aa, Artificial Sequence
  P07954 mitochondrial targeting peptide
MYRALRLLARSRPLVRAPAAALASAPGLGGAAVPSFWPPNAARM

SEQ ID NO: 321 - protein, 30 aa, Artificial Sequence
  P08559 mitochondrial targeting peptide
MRKMLAAVSRVLSGASQKPASRVLVASRNF

SEQ ID NO: 322 - protein, 84 aa, Artificial Sequence
  P08574 mitochondrial targeting peptide
MAAAAASLRGVVLGPRGAGLPGARARGLLCSARPGQLPLRTPQAVALSSKSGLSRGRKVMLSALGMLAAGGAGLAMALHSAVSA

SEQ ID NO: 323 - protein, 35 aa, Artificial Sequence
  P09622 mitochondrial targeting peptide
MQSWSRVYCSLAKRGHFNRISHGLQGLSAVPLRTY

SEQ ID NO: 324 - protein, 22 aa, Artificial Sequence
  P0C7M7 mitochondrial targeting peptide
MKIFFRYQTFRFIWLTKPPGRR

SEQ ID NO: 325 - protein, 14 aa, Artificial Sequence
  P0C7P0 mitochondrial targeting peptide
MRGAGAILRPAARG

SEQ ID NO: 326 - protein, 60 aa, Artificial Sequence
  P10109 mitochondrial targeting peptide
MAAAGGARLLRAASAVLGGPAGRWLHHAGSRAGSSGLLRNRGPGGSAEASRSLSVSARAR

SEQ ID NO: 327 - protein, 25 aa, Artificial Sequence
  P10176 mitochondrial targeting peptide
MSVLTPLLLRGLTGSARRLPVPRAK

SEQ ID NO: 328 - protein, 86 aa, Artificial Sequence
  P10515 mitochondrial targeting peptide
MWRVCARRAQNVAPWAGLEARWTALQEVPGTPRVTSRSGPAPARRNSVTTGYGGVRALCGWTPSSGATPRNRLLLQLLGSPGRRYY

SEQ ID NO: 329 - protein, 31 aa, Artificial Sequence
  P10606 mitochondrial targeting peptide
MASRLLRGAGTLAAQALRARGPSGAAAMRSM

SEQ ID NO: 330 - protein, 26 aa, Artificial Sequence
  P10809 mitochondrial targeting peptide
MLRLPTVFRQMRPVSRVLAPHLTRAY

SEQ ID NO: 331 - protein, 30 aa, Artificial Sequence
  P11177 mitochondrial targeting peptide
MAAVSGLVRRPLREVSGLLKRRFHWTAPAA

SEQ ID NO: 332 - protein, 61 aa, Artificial Sequence
  P11182 mitochondrial targeting peptide
MAAVRMLRTWSRNAGKLICVRYFQTCGNVHVLKPNYVCFFGYPSFKYSHPHHFLKTTAALR

SEQ ID NO: 333 - protein, 25 aa, Artificial Sequence
  P11310 mitochondrial targeting peptide
MAAGFGRCCRVLRSISRFHWRSQHT

SEQ ID NO: 334 - protein, 20 aa, Artificial Sequence
  P11498 mitochondrial targeting peptide
MLKFRTVHGGLRLLGIRRTS

SEQ ID NO: 335 - protein, 24 aa, Artificial Sequence
  P12074 mitochondrial targeting peptide
MAVVGVSSVSRLLGRSRPQLGRPM

SEQ ID NO: 336 - protein, 39 aa, Artificial Sequence
  P12532 mitochondrial targeting peptide
MAGPFSRLLSARPGLRLLALAGAGSLAAGFLLRPEPVRA

SEQ ID NO: 337 - protein, 45 aa, Artificial Sequence
  P12694 mitochondrial targeting peptide
MAVAIAAARVWRLNRGLSQAALLLLRQPGARGLARSHPPRQQQQF

SEQ ID NO: 338 - protein, 22 aa, Artificial Sequence
  P13073 mitochondrial targeting peptide
MLATRVFSLVGKRAISTSVCVR

SEQ ID NO: 339 - protein, 56 aa, Artificial Sequence
  P13196 mitochondrial targeting peptide
MESVVRRCPFLSRVPQAFLQKAGKSLLFYAQNCPKMMEVGAKPAPRALSTAAVHYQ

SEQ ID NO: 340 - protein, 19 aa, Artificial Sequence
  P13804 mitochondrial targeting peptide
MFRAAAPGQLRRAASLLRF

SEQ ID NO: 341 - protein, 35 aa, Artificial Sequence
  P13995 mitochondrial targeting peptide
MAATSLMSALAARLLQPAHSCSLRLRPFHLAAVRN

SEQ ID NO: 342 - protein, 23 aa, Artificial Sequence
  P14406 mitochondrial targeting peptide
MLRNLLALRQIGQRTISTASRRH

SEQ ID NO: 343 - protein, 24 aa, Artificial Sequence
  P15538 mitochondrial targeting peptide
MALRAKAEVCMAVPWLSLQRAQAL

SEQ ID NO: 344 - protein, 16 aa, Artificial Sequence
  P15954 mitochondrial targeting peptide
MLGQSIRRFTTSVVRR

SEQ ID NO: 345 - protein, 24 aa, Artificial Sequence
  P16219 mitochondrial targeting peptide
MAAALLARASGPARRALCPRAWRQ

SEQ ID NO: 346 - protein, 39 aa, Artificial Sequence
  P17540 mitochondrial targeting peptide
MASIFSKLLTGRNASLLFATMGTSVLTTGYLLNRQKVCA

SEQ ID NO: 347 - protein, 32 aa, Artificial Sequence
  P18859 mitochondrial targeting peptide
MILQRLFRFSSVIRSAVSVHLRRNIGVTAVAF

SEQ ID NO: 348 - protein, 24 aa, Artificial Sequence
  P19099 mitochondrial targeting peptide
MALRAKAEVCVAAPWLSLQRARAL

SEQ ID NO: 349 - protein, 32 aa, Artificial Sequence
  P19404 mitochondrial targeting peptide
MFFSAALRARAAGLTAHWGRHVRNLHKTVMQN

SEQ ID NO: 350 - protein, 41 aa, Artificial Sequence
  P20674 mitochondrial targeting peptide
MLGAALRRCAVAATTRADPRGLLHSARTPGPAVAIQSVRCY

SEQ ID NO: 351 - protein, 28 aa, Artificial Sequence
  P21912 mitochondrial targeting peptide
MAAVVALSLRRRLPATTLGGACLQASRG

SEQ ID NO: 352 - protein, 50 aa, Artificial Sequence
  P21953 mitochondrial targeting peptide
MAVVAAAAGWLLRLRAAGAEGHWRRLPGAGLARGFLHPAATVEDAAQRRQ

SEQ ID NO: 353 - protein, 32 aa, Artificial Sequence; identical to SEQ ID NO: 265
  P22033 mitochondrial targeting peptide

SEQ ID NO: 354 - protein, 49 aa, Artificial Sequence
  P22557 mitochondrial targeting peptide
MVTAAMLLQCCPVLARGPTSLLGKVVKTHQFLFGIGRCPILATQGPNCS

SEQ ID NO: 355 - protein, 32 aa, Artificial Sequence
  P22570 mitochondrial targeting peptide
MASRCWRWWGWSAWPRTRLPPAGSTPSFCHHF

SEQ ID NO: 356 - protein, 14 aa, Artificial Sequence
  P22695 mitochondrial targeting peptide
MKLLTRAGSFSRFY

SEQ ID NO: 357 - protein, 54 aa, Artificial Sequence
  P22830 mitochondrial targeting peptide
MRSLGANMAAALRAAGVLLRDPLASSSWRVCQPWRWKSGAAAAAVTTETAQHAQ

SEQ ID NO: 358 - protein, 18 aa, Artificial Sequence
  P23368 mitochondrial targeting peptide
MLSRLRVVSTTCTLACRH

SEQ ID NO: 359 - protein, 35 aa, Artificial Sequence
  P23378 mitochondrial targeting peptide
MQSCARAWGLRLGRGVGGGRRLAGGSGPCWAPRSR

SEQ ID NO: 360 - protein, 48 aa, Artificial Sequence
  P23434 mitochondrial targeting peptide
MALRVVRSVRALLCTLRAVPSPAAPCPPRPWQLGVGAVRTLRTGPALL

SEQ ID NO: 361 - protein, 25 aa, Artificial Sequence
  P23786 mitochondrial targeting peptide
MVPRLLLRAWPRGPAVGPGAPSRPL

SEQ ID NO: 362 - protein, 21 aa, Artificial Sequence
  P24310 mitochondrial targeting peptide
MQALRVSQALIRSFSSTARNR

SEQ ID NO: 363 - protein, 24 aa, Artificial Sequence
  P24311 mitochondrial targeting peptide
MFPLVKSALNRLQVRSIQQTMARQ

SEQ ID NO: 364 - protein, 42 aa, Artificial Sequence
  P24539 mitochondrial targeting peptide
MLSRVVLSAAATAAPSLKNAAFLGPGVLQATRTFHTGQPHLV

SEQ ID NO: 365 - protein, 33 aa, Artificial Sequence
  P24752 mitochondrial targeting peptide
MAVLAALLRSGARSRSPLLRRLVQEIRYVERSY

SEQ ID NO: 366 - protein, 43 aa, Artificial Sequence
  P25705 mitochondrial targeting peptide
MLSVRVAAAVVRALPRRAGLVSRNALGSSFIAARNFHASNTHL

SEQ ID NO: 367 - protein, 29 aa, Artificial Sequence
  P26440 mitochondrial targeting peptide
MATATRLLGWRVASWRLRPPLAGFVSQRA

SEQ ID NO: 368 - protein, 30 aa, Artificial Sequence
  P28330 mitochondrial targeting peptide
MAARLLRGSLRVLGGHRAPRQLPAARCSHS

SEQ ID NO: 369 - protein, 23 aa, Artificial Sequence
  P28331 mitochondrial targeting peptide
MLRIPVRKALVGLSKSPKGCVRT

SEQ ID NO: 370 - protein, 17 aa, Artificial Sequence
  P29372 mitochondrial targeting peptide
MVTPALQMKKPKQFCRR

SEQ ID NO: 371 - protein, 27 aa, Artificial Sequence
  P29803 mitochondrial targeting peptide
MLAAFISRVLRRVAQKSARRVLVASRN

SEQ ID NO: 372 - protein, 24 aa, Artificial Sequence
  P30038 mitochondrial targeting peptide
MLLPAPALRRALLSRPWTGAGLRW

SEQ ID NO: 373 - protein, 41 aa, Artificial Sequence
  P30042 mitochondrial targeting peptide
MAAVRVLVASRLAAASAFTSLSPGGRTPSQRAALHLSVPRP

SEQ ID NO: 374 - protein, 52 aa, Artificial Sequence
  P30044 mitochondrial targeting peptide
MGLAGVCALRRSAGYILVGGAGGQSAAAAARRYSEGEWASGGVRSFSRAAAA

SEQ ID NO: 375 - protein, 62 aa, Artificial Sequence
  P30048 mitochondrial targeting peptide
MAAAVGRLLRASVARHVSAIPWGISATAALRPAACGRTSLTNLLCSGSSQAKLFSTSSSCHA

SEQ ID NO: 376 - protein, 22 aa, Artificial Sequence
  P30049 mitochondrial targeting peptide
MLPAALLRRPGLGRLVRHARAY

SEQ ID NO: 377 - protein, 27 aa, Artificial Sequence
  P30084 mitochondrial targeting peptide
MAALRVLLSCVRGPLRPPVRCPAWRPF

SEQ ID NO: 378 - protein, 29 aa, Artificial Sequence
  P30405 mitochondrial targeting peptide
MLALRCGSRWLGLLSVPRSVPLRLPAARA

SEQ ID NO: 379 - protein, 17 aa, Artificial Sequence
  P30837 mitochondrial targeting peptide
MLRFLAPRLLSLQGRTA

SEQ ID NO: 380 - protein, 43 aa, Artificial Sequence
  P31040 mitochondrial targeting peptide
MSGVRGLSRLLSARRLALAKAWPTVLQTGTRGFHFTVDGNKRA

SEQ ID NO: 381 - protein, 38 aa, Artificial Sequence
  P31327 mitochondrial targeting peptide
MTRILTAFKVVRTLKTGFGFTNVTAHQKWKFSRPGIRL

SEQ ID NO: 382 - protein, 34 aa, Artificial Sequence
  P31930 mitochondrial targeting peptide
MAASVVCRAATAGAQVLLRARRSPALLRTPALRS

SEQ ID NO: 383 - protein, 36 aa, Artificial Sequence
  P31937 mitochondrial targeting peptide
MAASLRLLGAASGLRYWSRRLRPAAGSFAAVCSRSV

SEQ ID NO: 384 - protein, 69 aa, Artificial Sequence
  P33316 mitochondrial targeting peptide
MTPLCPRPALCYHFLTSLLRSAMQNARGARQRAEAAVLSGPGPPLGRAAQHGIPRPLSSAGRLSQGCRG

SEQ ID NO: 385 - protein, 29 aa, Artificial Sequence
  P34897 mitochondrial targeting peptide
MLYFSLFWAARPLQRCGQLVRMAIRAQHS

SEQ ID NO: 386 - protein, 38 aa, Artificial Sequence
  P35218 mitochondrial targeting peptide
MLGRNTWKTSAFSFLVEQMWAPLWSRSMRPGRWCSQRS

SEQ ID NO: 387 - protein, 27 aa, Artificial Sequence
  P35914 mitochondrial targeting peptide
MAAMRKALPRRLVGLASLRAVSTSSMG

SEQ ID NO: 388 - protein, 25 aa, Artificial Sequence
  P36542 mitochondrial targeting peptide
MFSRAGVAGLSAWTLQPQWIQVRNM

SEQ ID NO: 389 - protein, 110 aa, Artificial Sequence
  P36551 mitochondrial targeting peptide
MALQLGRLSSGPCWLVARGGCGGPRAWSQCGGGGLRAWSQRSAAGRVCRPPGPAGTEQSRGLGHGSTSRGGPWVGTGLAAALAGLVGLATAAFGHVQRAEMLPKTSGTRA

SEQ ID NO: 390 - protein, 18 aa, Artificial Sequence
  P36639 mitochondrial targeting peptide
MYWSNQITRRLGERVQGF

SEQ ID NO: 391 - protein, 67 aa, Artificial Sequence
  P36776 mitochondrial targeting peptide
MAASTGYVRLWGAARCWVLRRPMLAAAGGRVPTAAGAWLLRGQRTCDASPPWALWGRGPAIGGQWRG

SEQ ID NO: 392 - protein, 67 aa, Artificial Sequence
  P36957 mitochondrial targeting peptide
MLSRSRCVSRAFSRSLSAFQKGNCPLGRRSLPGVSLCQGPGYPNSRKVVINNSVFSVRFFRTTAVCK

SEQ ID NO: 393 - protein, 46 aa, Artificial Sequence
  P38646 mitochondrial targeting peptide
MISASRAAAARLVGAAASRGPTAARHQDSWNGLSHEAFRLVSRRDY

SEQ ID NO: 394 - protein, 33 aa, Artificial Sequence
  P40305 mitochondrial targeting peptide
MEASALTSSAVTSVAKVVRVASGSAVVLPLARI

SEQ ID NO: 395 - protein, 24 aa, Artificial Sequence
  P40926 mitochondrial targeting peptide
MLSALARPASAALRRSFSTSAQNN

SEQ ID NO: 396 - protein, 36 aa, Artificial Sequence
  P40939 mitochondrial targeting peptide
MVACRAIGILSRFSAFRILRSRGYICRNFTGSSALL

SEQ ID NO: 397 - protein, 41 aa, Artificial Sequence
  P42126 mitochondrial targeting peptide
MALVASVRVPARVLLRAGARLPGAALGRTERAAGGGDGARR

SEQ ID NO: 398 - protein, 59 aa, Artificial Sequence
  P42704 mitochondrial targeting peptide
MAALLRSARWLLRAGAAPRLPLSLRLLPGGPGRLHAASYLPAARAGPVAGGLLSPARLY

SEQ ID NO: 399 - protein, 16 aa, Artificial Sequence
  P42765 mitochondrial targeting peptide
MALLRGVFVVAAKRTP

SEQ ID NO: 400 - protein, 42 aa, Artificial Sequence
  P43304 mitochondrial targeting peptide
MAFQKAVKGTILVGGGALATVLGLSQFAHYRRKQMNLAYVKA

SEQ ID NO: 401 - protein, 45 aa, Artificial Sequence
  P43897 mitochondrial targeting peptide
MSLLRSLRVFLVARTGSYPAGSLLRQSPQPRHTFYAGPRLSASAS

SEQ ID NO: 402 - protein, 33 aa, Artificial Sequence
  P45954 mitochondrial targeting peptide
MEGLAVRLLRGSRLLRRNFLTCLSSWKIPPHVS

SEQ ID NO: 403 - protein, 29 aa, Artificial Sequence
  P46199 mitochondrial targeting peptide
MNQKLLKLENLLRFHTIYRQLHSLCQRRA

SEQ ID NO: 404 - protein, 78 aa, Artificial Sequence
  P47985 mitochondrial targeting peptide
MLSVASRSGPFAPVLSATSRGVAGALRPLVQATVPATPEQPVLDLKRPFLSRESLSGQAVRRPLVASVGLNVPASVCY

SEQ ID NO: 405 - protein, 23 aa, Artificial Sequence
  P48047 mitochondrial targeting peptide
MAAPAVSGLSRQVRCFSTSVVRP

SEQ ID NO: 406 - protein, 67 aa, Artificial Sequence
  P48201 mitochondrial targeting peptide
MFACAKLACTPSLIRAGSRVAYRPISASVLSRPEASRTGEGSTVFNGAQNGVSQLIQREFQTSAISR

SEQ ID NO: 407 - protein, 28 aa, Artificial Sequence
  P48728 mitochondrial targeting peptide
MQRAVSVVARLGFRLQAFPPALCRPLSC

SEQ ID NO: 408 - protein, 39 aa, Artificial Sequence
  P48735 mitochondrial targeting peptide
MAGYLRVVRSLCRASGSRPAWAPAALTAPTSQEQPRRHY

SEQ ID NO: 409 - protein, 43 aa, Artificial Sequence
  P49411 mitochondrial targeting peptide
MAAATLLRATPHFSGLAAGRTFLLQGLLRLLKAPALPLLCRGL

SEQ ID NO: 410 - protein, 26 aa, Artificial Sequence
  P49419 mitochondrial targeting peptide
MWRLPRALCVHAAKTSKLSGPWSRPA

SEQ ID NO: 411 - protein, 53 aa, Artificial Sequence
  P49448 mitochondrial targeting peptide
MYRYLAKALLPSRAGPAALGSAANHSAALLGRGRGQPAAASQPGLALAARRHY

SEQ ID NO: 412 - protein, 33 aa, Artificial Sequence
  P49590 mitochondrial targeting peptide
MPLLGLLPRRAWASLLSQLLRPPCASCTGAVRC

SEQ ID NO: 413 - protein, 63 aa, Artificial Sequence
  P49675 mitochondrial targeting peptide
MLLATFKLCAGSSYRHMRNMKGLRQQAVMAISQELNRRALGGPTPSTWINQVRRRSSLLGSRL

SEQ ID NO: 414 - protein, 40 aa, Artificial Sequence
  P49748 mitochondrial targeting peptide
MQAARMAASLGRQLLRLGGGSSRLTALLGQPRPGPARRPY

SEQ ID NO: 415 - protein, 20 aa, Artificial Sequence
  P49821 mitochondrial targeting peptide
MLATRRLLGWSLPARVSVRF

SEQ ID NO: 416 - protein, 42 aa, Artificial Sequence
  P49916 mitochondrial targeting peptide
MSLAFKIFFPQTLRALSRKELCLFRKHHWRDVRQFSQWSETD

SEQ ID NO: 417 - protein, 27 aa, Artificial Sequence
  P50213 mitochondrial targeting peptide
MAGPAWISKVSRLLGAFHNPKQVTRGF

SEQ ID NO: 418 - protein, 37 aa, Artificial Sequence
  P50440 mitochondrial targeting peptide
MLRVRCLRGGSRGAEAVHYIGSRLGRTLTGWVQRTFQ

SEQ ID NO: 419 - protein, 18 aa, Artificial Sequence
  P51398 mitochondrial targeting peptide
MMLKGITRLISRIHKLDP

SEQ ID NO: 420 - protein, 39 aa, Artificial Sequence
  P51553 mitochondrial targeting peptide
MALKVATVAGSAAKAVLGPALLCRPWEVLGAHEVPSRNI

SEQ ID NO: 421 - protein, 47 aa, Artificial Sequence
  P51649 mitochondrial targeting peptide
MATCIWLRSCGARRLGSTFPGCRLRPRAGGLVPASGPAPGPAQLRCY

SEQ ID NO: 422 - protein, 79 aa, Artificial Sequence
  P51687 mitochondrial targeting peptide
MLLLHRAVVLRLQQACRLKSIPSRICIQACSTNDSFQPQRPSLTFSGDNSSTQGWRVMGTLLGLGAVLAYQDHRCRAAQ

SEQ ID NO: 423 - protein, 45 aa, Artificial Sequence
  P52815 mitochondrial targeting peptide
MLPAAARPLWGPCLGLRAAAFRLARRQVPCVCAVRHMRSSGHQRC

SEQ ID NO: 424 - protein, 13 aa, Artificial Sequence
  P53007 mitochondrial targeting peptide
MPAPRAPRALAAA

SEQ ID NO: 425 - protein, 40 aa, Artificial Sequence
  P53597 mitochondrial targeting peptide
MTATLAAAADIATMVSGSSGLAAARLLSRSFLLPQNGIRH

SEQ ID NO: 426 - protein, 37 aa, Artificial Sequence
  P54868 mitochondrial targeting peptide
MQRLLTPVKRILQLTRAVQETSLTPARLLPVAHQRFS

SEQ ID NO: 427 - protein, 33 aa, Artificial Sequence
  P55084 mitochondrial targeting peptide
MTILTYPFKNLPTASKWALRFSIRPLSCSSQLR

SEQ ID NO: 428 - protein, 39 aa, Artificial Sequence
  P55809 mitochondrial targeting peptide
MAALKLLSSGLRLCASARGSGATWYKGCVCSFSTSAHRH

SEQ ID NO: 429 - protein, 34 aa, Artificial Sequence
  P56181 mitochondrial targeting peptide
MAAPCLLRQGRAGALKTMLQEAQVFRGLASTVSL

SEQ ID NO: 430 - protein, 24 aa, Artificial Sequence
  P59942 mitochondrial targeting peptide
MVLPLPWLSRYHFLRLLLPSWSLA

SEQ ID NO: 431 - protein, 22 aa, Artificial Sequence
  P78540 mitochondrial targeting peptide
MSLRGSLSRLLQTRVHSILKKS

SEQ ID NO: 432 - protein, 30 aa, Artificial Sequence
  P78549 mitochondrial targeting peptide
MCSPQESGMTALSARMLTRSRSLGPGAGPR

SEQ ID NO: 433 - protein, 28 aa, Artificial Sequence
  P80404 mitochondrial targeting peptide
MASMLLAQRLACSFQHSYRLLVPGSRHI

SEQ ID NO: 434 - protein, 57 aa, Artificial Sequence
  P82914 mitochondrial targeting peptide
MLRVAWRTLSLIRTRAVTQVLVPGLPGGGSAKFPFNQWGLQPRSLLLQAARGYVVRK

SEQ ID NO: 435 - protein, 115 aa, Artificial Sequence
  P83111 mitochondrial targeting peptide
MYRLMSAVTARAAAPGGLASSCGRRGVHQRAGLPPLGHGWVGGLGLGLGLALGVKLAGGLRGAAPAQSPAAPDPEASPLAEPPQEQSLAPWSPQTPAPPCSRCFARAIESSRDLL

SEQ ID NO: 436 - protein, 42 aa, Artificial Sequence
  Q00059 mitochondrial targeting peptide
MAFLRSMWGVLSALGRSGAELCTGCGSRLRSPFSFVYLPRWF

SEQ ID NO: 437 - protein, 49 aa, Artificial Sequence
  Q00325 mitochondrial targeting peptide
MFSSVAHLARANPFNTPHLQLVHDGLGDLRSSSPGPTGQPRRPRNLAAA

SEQ ID NO: 438 - protein, 10 aa, Artificial Sequence
  Q02127 mitochondrial targeting peptide
MAWRHLKKRA

SEQ ID NO: 439 - protein, 40 aa, Artificial Sequence
  Q02218 mitochondrial targeting peptide
MFHLRTCAAKLRPLTASQTVKTFSQNRPAAARTFQQIRCY

SEQ ID NO: 440 - protein, 12 aa, Artificial Sequence
  Q02221 mitochondrial targeting peptide
MALPLRPLTRGL

SEQ ID NO: 441 - protein, 33 aa, Artificial Sequence
  Q02252 mitochondrial targeting peptide
MAALLAAAAVRARILQVSSKVKSSPTWYSASSF

SEQ ID NO: 442 - protein, 33 aa, Artificial Sequence
  Q02318 mitochondrial targeting peptide
MAALGCARLRWALRGAGRGLCPHGARAKAAIPA

SEQ ID NO: 443 - protein, 46 aa, Artificial Sequence
  Q02338 mitochondrial targeting peptide
MLATRLSRPLSRLPGKTLSACDRENGARRPLLLGSTSFIPIGRRTY

SEQ ID NO: 444 - protein, 16 aa, Artificial Sequence
  Q04837 mitochondrial targeting peptide
MFRRPVLQVLRQFVRH

SEQ ID NO: 445 - protein, 42 aa, Artificial Sequence
  Q05932 mitochondrial targeting peptide
MSRARSHLRAALFLAAASARGITTQVAARRGLSAWPVPQEPS

SEQ ID NO: 446 - protein, 66 aa, Artificial Sequence
  Q06055 mitochondrial targeting peptide
MFACSKFVSTPSLVKSTSQLLSRPLSAVVLKRPEILTDESLSSLAVSCPLTSLVSSRSFQTSAISR

SEQ ID NO: 447 - protein, 73 aa, Artificial Sequence
  Q07021 mitochondrial targeting peptide
MLPLLRCVPRVLGSSVAGLRAAAPASPFRQLLQPAPRLCTRPFGLLSVRAGSERRPGLLRPRGPCACGCGCGS

SEQ ID NO: 448 - protein, 35 aa, Artificial Sequence
  Q07973 mitochondrial targeting peptide
MSSPISKSRSLAAFLQQLRSPRQPPRLVTSTAYTS

SEQ ID NO: 449 - protein, 31 aa, Artificial Sequence
  Q08AH1 mitochondrial targeting peptide
MQWLMRFRTLWGIHKSFHNIHPAPSQLRCRS

SEQ ID NO: 450 - protein, 46 aa, Artificial Sequence
  Q08AH3 mitochondrial targeting peptide
MHWLRKVQGLCTLWGTQMSSRTLYINSRQLVSLQWGHQEVPAKFNF

SEQ ID NO: 451 - protein, 33 aa, Artificial Sequence
  Q10713 mitochondrial targeting peptide
MAAVVLAATRLLRGSGSWGCSRLRFGPPAYRRF

SEQ ID NO: 452 - protein, 117 aa, Artificial Sequence
  Q12849 mitochondrial targeting peptide
MAGTRWVLGALLRGCGCNCSSCRRTGAACLPFYSAAGSIPSGVSGRRRLLLLLGAAAAAASQTRGLQTGPVPPGRLAGPPAVATSAAAAAAASYSALRASLLPQSLAAAAAVPTRSY

SEQ ID NO: 453 - protein, 59 aa, Artificial Sequence
  Q12931 mitochondrial targeting peptide
MARELRALLLWGRRLRPLLRAPALAAVPGGKPILCPRRTTAQLGPRRNPAWSLQAGRLF

SEQ ID NO: 454 - protein, 33 aa, Artificial Sequence
  Q13011 mitochondrial targeting peptide
MAAGIVASRRLRDLLTRRLTGSNYPGLSISLRL

SEQ ID NO: 455 - protein, 55 aa, Artificial Sequence
  Q13084 mitochondrial targeting peptide
MPLHKYPVWLWKRLQLREGICSRLPGHYLRSLEEERTPTPVHYRPHGAKFKINPK

SEQ ID NO: 456 - protein, 23 aa, Artificial Sequence
  Q13268 mitochondrial targeting peptide
MLSAVARGYQGWFHPCARLSVRM

SEQ ID NO: 457 - protein, 43 aa, Artificial Sequence
  Q13423 mitochondrial targeting peptide
MANLLKTVVTGCSCPLLSNLGSCKGLRVKKDFLRTFYTHQELW

SEQ ID NO: 458 - protein, 67 aa, Artificial Sequence
  Q13825 mitochondrial targeting peptide
MAAAVAAAPGALGSLHAGGARLVAACSAWLCPGLRLPGSLAGRRAGPAIWAQGWVPAAGGPAPKRGY

SEQ ID NO: 459 - protein, 101 aa, Artificial Sequence
  Q14154 mitochondrial targeting peptide
MWRLPGLLGRALPRTLGPSLWRVTPKSTSPDGPQTTSSTLLVPVPNLDRSGPHGPGTSGGPRSHGWKDAFQWMSSRVSPNTLWDAISWGTLAVLALQLARQ

SEQ ID NO: 460 - protein, 29 aa, Artificial Sequence
  Q14197 mitochondrial targeting peptide
MAATRCLRWGLSRAGVWLLPPPARCPRRA

SEQ ID NO: 461 - protein, 48 aa, Artificial Sequence
  Q14249 mitochondrial targeting peptide
MRALRAGLTLASGAGLGAVVEGWRRRREDARAAPGLLGRLPVLPVAAA

SEQ ID NO: 462 - protein, 28 aa, Artificial Sequence
  Q15118 mitochondrial targeting peptide
MRLARLLRGAALAGPGPGLRAAGFSRSF

SEQ ID NO: 463 - protein, 48 aa, Artificial Sequence
  Q15390 mitochondrial targeting peptide
MLGWIKRLIRMVFQQVGVSMQSVLWSRKPYGSSRSIVRKIGTNLSLIQ

SEQ ID NO: 464 - protein, 33 aa, Artificial Sequence
  Q16134 mitochondrial targeting peptide
MLVPLAKLSCLAYQCFHALKIKKNYLPLCATRW

SEQ ID NO: 465 - protein, 41 aa, Artificial Sequence
  Q16595 mitochondrial targeting peptide
MWTLGRRAVAGLLASPSPAQAQTLTRVPRPAELAPLCGRRG

SEQ ID NO: 466 - protein, 34 aa, Artificial Sequence
  Q16698 mitochondrial targeting peptide
MKLPARVFFTLGSRLPCGLAPRRFFSYGTKILYQ

SEQ ID NO: 467 - protein, 56 aa, Artificial Sequence
  Q16740 mitochondrial targeting peptide
MWPGILVGGARVASCRYPALGPRLAAHFPAQRPPQRTLQNGLALQRCLHATATRAL

SEQ ID NO: 468 - protein, 13 aa, Artificial Sequence
  Q16775 mitochondrial targeting peptide
MVVGRGLLGRRSL

SEQ ID NO: 469 - protein, 35 aa, Artificial Sequence
  Q16795 mitochondrial targeting peptide
MAAAAQSRVVRVLSMSRSAITAIATSVCHGPPCRQ

SEQ ID NO: 470 - protein, 32 aa, Artificial Sequence
  Q16822 mitochondrial targeting peptide
MAALYRPGLRLNWHGLSPLGWPSCRSIQTLRV

SEQ ID NO: 471 - protein, 12 aa, Artificial Sequence
  Q16836 mitochondrial targeting peptide
MAFVTRQFMRSV

SEQ ID NO: 472 - protein, 39 aa, Artificial Sequence
  Q16854 mitochondrial targeting peptide
MAAGRLFLSRLRAPFSSMAKSPLEGVSSSRGLHAGRGPR

SEQ ID NO: 473 - protein, 33 aa, Artificial Sequence
  Q16891 mitochondrial targeting peptide
MLRACQLSGVTAAAQSCLCGKFVLRPLRPCRRY

SEQ ID NO: 474 - protein, 25 aa, Artificial Sequence
  Q2VYF4 mitochondrial targeting peptide
MAFYSYNSVLAIARTRFPSHFVHPT

SEQ ID NO: 475 - protein, 28 aa, Artificial Sequence
  Q32NB8 mitochondrial targeting peptide
MAVAAAAAAGPVFWRRLLGLLPGRPGLA

SEQ ID NO: 476 - protein, 44 aa, Artificial Sequence
  Q330K2 mitochondrial targeting peptide
MAASAHGSVWGPLRLGIPGLCCRRPPLGLYARMRRLPGPEVSGR

SEQ ID NO: 477 - protein, 19 aa, Artificial Sequence
  Q3SY69 mitochondrial targeting peptide
MLRRGSQALRRFSTGRVYF

SEQ ID NO: 478 - protein, 44 aa, Artificial Sequence
  Q3ZCQ8 mitochondrial targeting peptide
MAASAAVFSRLRSGLRLGSRGLCTRLATPPRRAPDQAAEIGSRG

SEQ ID NO: 479 - protein, 35 aa, Artificial Sequence
  Q49AM1 mitochondrial targeting peptide
MLWKLLLRSQSCRLCSFRKMRSPPKYRPFLACFTY

SEQ ID NO: 480 - protein, 62 aa, Artificial Sequence
  Q4G0N4 mitochondrial targeting peptide
MTCYRGFLLGSCCRVAGGRAAALRGPGAGGPAARPRLGGDGGGRRHLGQGQPRELAGCGSRA

SEQ ID NO: 481 - protein, 83 aa, Artificial Sequence
  Q4G176 mitochondrial targeting peptide
MLPHVVLTFRRLGCALASCRLAPARHRGSGLLHTAPVARSDRSAPVFTRALAFGDRIALVDQHGRHTYRELYSRSLRLSQEIC

SEQ ID NO: 482 - protein, 31 aa, Artificial Sequence
  Q4U2R6 mitochondrial targeting peptide
MAGNLLSGAGRRLWDWVPLACRSFSLGVPRL

SEQ ID NO: 483 - protein, 27 aa, Artificial Sequence
  Q53FZ2 mitochondrial targeting peptide
MLARVTRKMLRHAKCFQRLAIFGSVRA

SEQ ID NO: 484 - protein, 31 aa, Artificial Sequence
  Q53H12 mitochondrial targeting peptide
MTVFFKTLRNHWKKTTAGLCLLTWGGHWLYG

SEQ ID NO: 485 - protein, 98 aa, Artificial Sequence
  Q5EBM0 mitochondrial targeting peptide
MAFARRLLRGPLSGPLLGRRGVCAGAMAPPRRFVLELPDCTLAHFALGADAPGDADAPDPRLAALLGPPERSYSLCVPVTPDAGCGARVRAARLHQRL

SEQ ID NO: 486 - protein, 42 aa, Artificial Sequence
  Q5HYK3 mitochondrial targeting peptide
MAAPGSCALWSYCGRGWSRAMRGCQLLGLRSSWPGDLLSARL

SEQ ID NO: 487 - protein, 41 aa, Artificial Sequence
  Q5JPH6 mitochondrial targeting peptide
MAALLRRLLQRERPSAASGRPVGRREANLGTDAGVAVRVRF

SEQ ID NO: 488 - protein, 15 aa, Artificial Sequence
  Q5JRX3 mitochondrial targeting peptide
MWRCGGRQGLCVLRR

SEQ ID NO: 489 - protein, 23 aa, Artificial Sequence
  Q5JTZ9 mitochondrial targeting peptide
MAASVAAAARRLRRAIRRSPAWR

SEQ ID NO: 490 - protein, 26 aa, Artificial Sequence
  Q5ST30 mitochondrial targeting peptide
MPHLPLASFRPPFWGLRHSRGLPRFH

SEQ ID NO: 491 - protein, 49 aa, Artificial Sequence
  Q5SXM8 mitochondrial targeting peptide
MLRTALRGAPRLLSRVQPRAPCLRRLWGRGARPEVAGRRRAWAWGWRRS

SEQ ID NO: 492 - protein, 16 aa, Artificial Sequence
  Q5T160 mitochondrial targeting peptide
MACGFRRAIACQLSRV

SEQ ID NO: 493 - protein, 36 aa, Artificial Sequence
  Q5T1C6 mitochondrial targeting peptide
MLRSCAARLRTLGALCLPPVGRRLPGSEPRPELRSF

SEQ ID NO: 494 - protein, 9 aa, Artificial Sequence
  Q5T1J5 mitochondrial targeting peptide
MPRGSRSRT

SEQ ID NO: 495 - protein, 39 aa, Artificial Sequence
  Q5T440 mitochondrial targeting peptide
MATAALLRGATPGRGGPVWRWRLRAAPRCRLAHSSCSPG

SEQ ID NO: 496 - protein, 60 aa, Artificial Sequence
  Q5T653 mitochondrial targeting peptide
MALCALTRALRSLNLAPPTVAAPAPSLFPAAQMMNNGLLQQPSALMLLPCRPVLTSVALN

SEQ ID NO: 497 - protein, 57 aa, Artificial Sequence
  Q5TC12 mitochondrial targeting peptide
MAAVVVAAAGGAGPAVLQVAGLYRGLCAVRSRALGLGLVSPAQLRVFPVRPGSGRPE

SEQ ID NO: 498 - protein, 36 aa, Artificial Sequence
  Q5TEU4 mitochondrial targeting peptide
MLRPAGLWRLCRRPWAARVPAENLGRREVTSGVSPR

SEQ ID NO: 499 - protein, 48 aa, Artificial Sequence
  Q5U4N7 mitochondrial targeting peptide
MIQSSQPMSLKLTCSAFRLQRALRFLLGRLPWRVASGARRFRRWLNRY

SEQ ID NO: 500 - protein, 20 aa, Artificial Sequence
  Q5VUM1 mitochondrial targeting peptide
MTPSRLPWLLSWVSATAWRA

SEQ ID NO: 501 - protein, 46 aa, Artificial Sequence; identical to SEQ ID NO: 450
  Q68CK6 mitochondrial targeting peptide

SEQ ID NO: 502 - protein, 70 aa, Artificial Sequence
  Q6DKK2 mitochondrial targeting peptide
MFRLLSWSLGRGFLRAAGRRCRGCSARLLPGLAGGPGPEVQVPPSRVAPHGRGPGLLPLLAALAWFSRPA

SEQ ID NO: 503 - protein, 20 aa, Artificial Sequence
  Q6IN84 mitochondrial targeting peptide
MALLSTVRGATWGRLVTRHF

SEQ ID NO: 504 - protein, 26 aa, Artificial Sequence
  Q6J4K2 mitochondrial targeting peptide
MAGRRLNLRWALSVLCVLLMAETVSG

SEQ ID NO: 505 - protein, 16 aa, Artificial Sequence
  Q6L8Q7 mitochondrial targeting peptide
MWRLPGARAALRVIRT

SEQ ID NO: 506 - protein, 26 aa, Artificial Sequence
  Q6NUN0 mitochondrial targeting peptide
MRPWLRHLVLQALRNSRAFCGSHGKP

SEQ ID NO: 507 - protein, 32 aa, Artificial Sequence
  Q6NVY1 mitochondrial targeting peptide
MGQREMWRLMSRFNAFKRTNTILHHLRMSKHT

SEQ ID NO: 508 - protein, 14 aa, Artificial Sequence
  Q6P161 mitochondrial targeting peptide
MATKRLFGATRTWA

SEQ ID NO: 509 - protein, 30 aa, Artificial Sequence
  Q6P1L8 mitochondrial targeting peptide
MAFFTGLWGPFTCVSRVLSHHCFSTTGSLS

SEQ ID NO: 510 - protein, 21 aa, Artificial Sequence
  Q6P461 mitochondrial targeting peptide
MLGRFQPFSLVRSFRLGFEAC

SEQ ID NO: 511 - protein, 52 aa, Artificial Sequence
  Q6P4F2 mitochondrial targeting peptide
MAASMARGGVSARVLLQAARGTWWNRPGGTSGSGEGVALGTTRKFQATGSRP

SEQ ID NO: 512 - protein, 27 aa, Artificial Sequence
  Q6P587 mitochondrial targeting peptide
MGIMAASRPLSRFWEWGKNIVCVGRNY

SEQ ID NO: 513 - protein, 47 aa, Artificial Sequence
  Q6PI48 mitochondrial targeting peptide
MYFPSWLSQLYRGLSRPIRRTTQPIWGSLYRSLLQSSQRRIPEFSSF

SEQ ID NO: 514 - protein, 27 aa, Artificial Sequence
  Q6SZW1 mitochondrial targeting peptide
MVLTLLLSAYKLCRFFAMSGPRPGAER

SEQ ID NO: 515 - protein, 19 aa, Artificial Sequence
  Q6UB28 mitochondrial targeting peptide
MAAPSGVHLLVRRGSHRIF

SEQ ID NO: 516 - protein, 31 aa, Artificial Sequence
  Q6UB35 mitochondrial targeting peptide
MGTRLPLVLRQLRRPPQPPGPPRRLRVPCRA

SEQ ID NO: 517 - protein, 22 aa, Artificial Sequence
  Q6UWS5 mitochondrial targeting peptide
MSRSSKVVLGLSVLLTAATVAG

SEQ ID NO: 518 - protein, 27 aa, Artificial Sequence
  Q6UXV4 mitochondrial targeting peptide
MAAIRMGKLTTMPAGLIYASVSVHAAK

SEQ ID NO: 519 - protein, 29 aa, Artificial Sequence
  Q6ZSR3 mitochondrial targeting peptide
MGWRFPSPSPRQASPVAPLLAAPTAVRSC

SEQ ID NO: 520 - protein, 39 aa, Artificial Sequence
  Q7L0Y3 mitochondrial targeting peptide
MAAFLKMSVSVNFFRPFTRFLVPFTLHRKRNNLTILQRY

SEQ ID NO: 521 - protein, 29 aa, Artificial Sequence
  Q7L3T8 mitochondrial targeting peptide
MEGLLTRCRALPALATCSRQLSGYVPCRF

SEQ ID NO: 522 - protein, 46 aa, Artificial Sequence
  Q7L592 mitochondrial targeting peptide
MSVLLRSGLGPLCAVARAAIPFIWRGKYFSSGNEPAENPVTPMLRH

SEQ ID NO: 523 - protein, 27 aa, Artificial Sequence
  Q7L8L6 mitochondrial targeting peptide
MAATLKSLKLVRYRAFCSPSAFGAVRS

SEQ ID NO: 524 - protein, 39 aa, Artificial Sequence
  Q7Z2W9 mitochondrial targeting peptide
MAASSLTVTLGRLASACSHSILRPSGPGAASLWSASRRF

SEQ ID NO: 525 - protein, 28 aa, Artificial Sequence
  Q7Z3D6 mitochondrial targeting peptide
MPFTLHLRSRLPSAIRSLILQKKPNIRN

SEQ ID NO: 526 - protein, 29 aa, Artificial Sequence
  Q7Z4L0 mitochondrial targeting peptide
MPLLRGRCPARRHYRRLALLGLQPAPRFA

SEQ ID NO: 527 - protein, 24 aa, Artificial Sequence
  Q7Z5L4 mitochondrial targeting peptide
MIITTWIVYILARKGVGLPFLPIT

SEQ ID NO: 528 - protein, 42 aa, Artificial Sequence
  Q7Z6M4 mitochondrial targeting peptide
MAAFGRQVLDWHRLIPLTWACMARQTPHLGEQRRTTASLLRK

SEQ ID NO: 529 - protein, 33 aa, Artificial Sequence
  Q7Z7F7 mitochondrial targeting peptide
MAAVGSLLGRLRQSTVKATGPALRRLHTSSWRA

SEQ ID NO: 530 - protein, 28 aa, Artificial Sequence
  Q7Z7H8 mitochondrial targeting peptide
MAAAVAGMLRGGLLPQAGRLPTLQTVRY

SEQ ID NO: 531 - protein, 31 aa, Artificial Sequence
  Q86SX6 mitochondrial targeting peptide
MSGSLGRAAAALLRWGRGAGGGGLWGPGVRA

SEQ ID NO: 532 - protein, 23 aa, Artificial Sequence
  Q86TS9 mitochondrial targeting peptide
MAALGTVLFTGVRRLHCSVAAWA

SEQ ID NO: 533 - protein, 8 aa, Artificial Sequence
  Q86U28 mitochondrial targeting peptide
MAAAWGSS

SEQ ID NO: 534 - protein, 55 aa, Artificial Sequence
  Q86U90 mitochondrial targeting peptide
MSPARRCRGMRAAVAASVGLSEGPAGSRSGRLFRPPSPAPAAPGARLLRLPGSGA

SEQ ID NO: 535 - protein, 86 aa, Artificial Sequence
  Q86UT6 mitochondrial targeting peptide
MRWGHHLPRASWGSGFRRALQRPDDRIPFLIHWSWPLQGERPFGPPRAFIRHHGSSVDSAPPPGRHGRLFPSASATEAIQRHRRNL

SEQ ID NO: 536 - protein, 25 aa, Artificial Sequence
  Q86XE5 mitochondrial targeting peptide
MLGPQVWSSVRQGLSRSLSRNVGVW

SEQ ID NO: 537 - protein, 35 aa, Artificial Sequence
  Q86YB7 mitochondrial targeting peptide
MLRVLCLLRPWRPLRARGCASDGAAGGSEIQVRAL

SEQ ID NO: 538 - protein, 65 aa, Artificial Sequence
  Q8IVH4 mitochondrial targeting peptide
MPMLLPHPHQHFLKGLLRAPFRCYHFIFHSSTHLGSGIPCAQPFNSLGLHCTKWMLLSDGLKRKL

SEQ ID NO: 539 - protein, 21 aa, Artificial Sequence
  Q8IVS2 mitochondrial targeting peptide
MSVRVARVAWVRGLGASYRRG

SEQ ID NO: 540 - protein, 29 aa, Artificial Sequence
  Q8IWL3 mitochondrial targeting peptide
MWRGRAGALLRVWGFWPTGVPRRRPLSCD

SEQ ID NO: 541 - protein, 13 aa, Artificial Sequence
  Q8IXM3 mitochondrial targeting peptide
MGVLAAAARCLVR

SEQ ID NO: 542 - protein, 38 aa, Artificial Sequence
  Q8IXQ9 mitochondrial targeting peptide
MALSLGWKAHRNHCGLLLQALRSSGLLLFPCGQCPWRG

SEQ ID NO: 543 - protein, 22 aa, Artificial Sequence
  Q8IYB8 mitochondrial targeting peptide
MSFSRALLWARLPAGRQAGHRA

SEQ ID NO: 544 - protein, 22 aa, Artificial Sequence
  Q8IYU8 mitochondrial targeting peptide
MAAAAGSCARVAAWGGKLRRGL

SEQ ID NO: 545 - protein, 41 aa, Artificial Sequence
  Q8N0V3 mitochondrial targeting peptide
MWAAAGGLWRSRAGLRALFRSRDAALFPGCERGLHCSAVSC

SEQ ID NO: 546 - protein, 22 aa, Artificial Sequence
  Q8N0X4 mitochondrial targeting peptide
MALRLLRRAARGAAAAALLRLK

SEQ ID NO: 547 - protein, 18 aa, Artificial Sequence
  Q8N159 mitochondrial targeting peptide
MATALMAVVLRAAAVAPR

SEQ ID NO: 548 - protein, 36 aa, Artificial Sequence
  Q8N1F1 mitochondrial targeting peptide
MFPGSLSRGRRAAVEMAWLPGSCARVAFAAGAAARY

SEQ ID NO: 549 - protein, 29 aa, Artificial Sequence
  Q8N3J5 mitochondrial targeting peptide
MSTAALITLVRSGGNQVRRRVLLSSRLLQ

SEQ ID NO: 550 - protein, 49 aa, Artificial Sequence
  Q8N442 mitochondrial targeting peptide
MWTLVGRGWGCARALAPRATGAALLVAPGPRSAPTLGAAPESWATDRLY

SEQ ID NO: 551 - protein, 13 aa, Artificial Sequence
  Q8N465 mitochondrial targeting peptide
MLPRRPLAWPAWL

SEQ ID NO: 552 - protein, 49 aa, Artificial Sequence
  Q8N4E7 mitochondrial targeting peptide
MLSCFRLLSRHISPSLASLRPVRCCFALPLRWAPGRPLDPRQIAPRRPL

SEQ ID NO: 553 - protein, 40 aa, Artificial Sequence
  Q8N5M1 mitochondrial targeting peptide
MWRSCLRLRDGGRRLLNRPAGGPSASMSPGPTIPSPARAY

SEQ ID NO: 554 - protein, 29 aa, Artificial Sequence
  Q8N5Z0 mitochondrial targeting peptide
MNYARFITAASAARNPSPIRTMTDILSRG

SEQ ID NO: 555 - protein, 27 aa, Artificial Sequence
  Q8NCN5 mitochondrial targeting peptide
MMFYRLLSIVGRQRASPGWQNWSSARN

SEQ ID NO: 556 - protein, 47 aa, Artificial Sequence
  Q8NCW5 mitochondrial targeting peptide
MSRLRALLGLGLLVAGSRVPRIKSQTIACRSGPTWWGPQRLNSGGRW

SEQ ID NO: 557 - protein, 29 aa, Artificial Sequence
  Q8NE62 mitochondrial targeting peptide
MWCLLRGLGRPGALARGALGQQQSLGARA

SEQ ID NO: 558 - protein, 50 aa, Artificial Sequence
  Q8NE86 mitochondrial targeting peptide
MAAAAGRSLLLLLSSRGGGGGGAGGCGALTAGCFPGLGVSRHRQQQHHRT

SEQ ID NO: 559 - protein, 17 aa, Artificial Sequence
  Q8NFF5 mitochondrial targeting peptide
MGWDLGTRLFQRQEQRS

SEQ ID NO: 560 - protein, 162 aa, Artificial Sequence
  Q8NI60 mitochondrial targeting peptide
MAAILGDTIMVAKGLVKLTQAAVETHLQHLGIGGELIMAARALQSTAVEQIGMFLGKVQGQDKHEEYFAENFGGPEGEFHFSVPHAAGASTDFSSASAPDQSAPPSLGHAHSEGPAPAYVASGPFREAGFPGQASSPLGRANGRLFANPRDSFSAMGFQRRF

SEQ ID NO: 561 - protein, 32 aa, Artificial Sequence
  Q8TAA5 mitochondrial targeting peptide
MAVRSLWAGRLRVQRLLAWSAAWESKGWPLPF

SEQ ID NO: 562 - protein, 38 aa, Artificial Sequence
  Q8TB37 mitochondrial targeting peptide
MGIWQRLLLFGGVSLRAGGGATAPLGGSRAMVCGRQLS

SEQ ID NO: 563 - protein, 34 aa, Artificial Sequence
  Q8TCC3 mitochondrial targeting peptide
MAGILRLVVQWPPGRLQTVTKGVESLICTDWIRH

SEQ ID NO: 564 - protein, 45 aa, Artificial Sequence
  Q8TCS8 mitochondrial targeting peptide
MAACRYCCSCLRLRPLSDGPFLLPRRDRALTQLQVRALWSSAGSR

SEQ ID NO: 565 - protein, 25 aa, Artificial Sequence
  Q8TF08 mitochondrial targeting peptide
MMFPLARNALSSLKIQSILQSMARH

SEQ ID NO: 566 - protein, 27 aa, Artificial Sequence
  Q8WUK0 mitochondrial targeting peptide
MAATALLEAGLARVLFYPTLLYTLFRG

SEQ ID NO: 567 - protein, 27 aa, Artificial Sequence
  Q8WVM0 mitochondrial targeting peptide
MAASGKLSTCRLPPLPTIREIIKLLRL

SEQ ID NO: 568 - protein, 96 aa, Artificial Sequence
  Q8WWC4 mitochondrial targeting peptide
MALAARLLPQFLHSRSLPCGAVRLRTPAVAEVRLPSATLCYFCRCRLGLGAALFPRSARALAASALPAQGSRWPVLSSPGLPAAFASFPACPQRSY

SEQ ID NO: 569 - protein, 40 aa, Artificial Sequence
  Q8WWV3 mitochondrial targeting peptide
MEFLKTCVLRRNACTAVCFWRSKVVQKPSVRRISTTSPRS

SEQ ID NO: 570 - protein, 16 aa, Artificial Sequence
  Q8WYQ3 mitochondrial targeting peptide
MPRGSRSAASRPASRP

SEQ ID NO: 571 - protein, 65 aa, Artificial Sequence
  Q92665 mitochondrial targeting peptide
MFPRVSTFLPLRPLSRHPLSSGSPETSAAAIMLLTVRHGTVRYRSSALLARTKNNIQRYFGTNSV

SEQ ID NO: 572 - protein, 29 aa, Artificial Sequence
  Q92667 mitochondrial targeting peptide
MAIQFRSLFPLALPGMLALLGWWWFFSRK

SEQ ID NO: 573 - protein, 44 aa, Artificial Sequence
  Q92947 mitochondrial targeting peptide
MALRGVSVRLLSRGPGLHVLRTWVSSAAQTEKGGRTQSQLAKSS

SEQ ID NO: 574 - protein, 50 aa, Artificial Sequence
  Q969P6 mitochondrial targeting peptide
MRVVRLLRLRAALTLLGEVPRRPASRGVPGSRRTQKGSGARWEKEKHEDG

SEQ ID NO: 575 - protein, 81 aa, Artificial Sequence
  Q969Y2 mitochondrial targeting peptide
MWRGLWTLAAQAARGPRRLCTRRSSGAPAPGSGATIFALSSGQGRCGIAVIRTSGPASGHALRILTAPRDLPLARHASLRL

SEQ ID NO: 576 - protein, 107 aa, Artificial Sequence
  Q969Z0 mitochondrial targeting peptide
MAAHLVKRCTCLLREAARQAPAMAPVGRLRLAWVAHKTLTSSATSPISHLPGSLMEPVEKERASTPYIEKQVDHLIKKATRPEELLELLGGSHDLDSNQAAMVLIRL

SEQ ID NO: 577 - protein, 35 aa, Artificial Sequence
  Q969Z3 mitochondrial targeting peptide
MGASSSSALARLGLPARPWPRWLGVAALGLAAVAL

SEQ ID NO: 578 - protein, 9 aa, Artificial Sequence
  Q96A35 mitochondrial targeting peptide
MRLSALLAL

SEQ ID NO: 579 - protein, 24 aa, Artificial Sequence
  Q96BW9 mitochondrial targeting peptide
MALQTLQSSWVTFRKILSHFPEEL

SEQ ID NO: 580 - protein, 25 aa, Artificial Sequence
  Q96CB9 mitochondrial targeting peptide
MAALTLRGVRELLKRVDLATVPRRH

SEQ ID NO: 581 - protein, 41 aa, Artificial Sequence
  Q96CM8 mitochondrial targeting peptide
MAVYVGMLRLGRLCAGSSGVLGARAALSRSWQEARLQGVRF

SEQ ID NO: 582 - protein, 17 aa, Artificial Sequence
  Q96DC8 mitochondrial targeting peptide
MAAVAVLRAFGASGPMC

SEQ ID NO: 583 - protein, 26 aa, Artificial Sequence
  Q96DV4 mitochondrial targeting peptide
MAAPWWRAALCECRRWRGFSTSAVLG

SEQ ID NO: 584 - protein, 55 aa, Artificial Sequence
  Q96E11 mitochondrial targeting peptide
MALGLKCFRMVHPTFRNYLAASIRPVSEVTLKTVHERQHGHRQYMAYSAVPVRHF

SEQ ID NO: 585 - protein, 68 aa, Artificial Sequence
  Q96E29 mitochondrial targeting peptide
MALSAQQIPRWFNSVKLRSLINAAQLTKRFTRPARTLLHGFSAQPQISSDNCFLQWGFKTYRTSSLWN

SEQ ID NO: 586 - protein, 13 aa, Artificial Sequence
  Q96E52 mitochondrial targeting peptide
MSFICGLQSAARN

SEQ ID NO: 587 - protein, 35 aa, Artificial Sequence
  Q96EL2 mitochondrial targeting peptide
MAASVCSGLLGPRVLSWSRELPCAWRALHTSPVCA

SEQ ID NO: 588 - protein, 37 aa, Artificial Sequence
  Q96EY7 mitochondrial targeting peptide
MAVVSAVRWLGLRSRLGQPLTGRRAGLCEQARSCRFY

SEQ ID NO: 589 - protein, 32 aa, Artificial Sequence
  Q96EY8 mitochondrial targeting peptide
MAVCGLGSRLGLGSRLGLRGCFGAARLLYPRF

SEQ ID NO: 590 - protein, 28 aa, Artificial Sequence
  Q96GC5 mitochondrial targeting peptide
MSGTLEKVLCLRNNTIFKQAFSLLRFRT

SEQ ID NO: 591 - protein, 29 aa, Artificial Sequence
  Q96GW9 mitochondrial targeting peptide
MLRTSVLRLLGRTGASRLSLLEDFGPRYY

SEQ ID NO: 592 - protein, 34 aa, Artificial Sequence
  Q96H96 mitochondrial targeting peptide
MLGSRAAGFARGLRALALAWLPGWRGRSFALARA

SEQ ID NO: 593 - protein, 35 aa, Artificial Sequence
  Q96I23 mitochondrial targeting peptide
MLSGARCRLASALRGTRAPPSAVARRCLHASGSRP

SEQ ID NO: 594 - protein, 14 aa, Artificial Sequence
  Q96I59 mitochondrial targeting peptide
MLGVRCLLRSVRFC

SEQ ID NO: 595 - protein, 37 aa, Artificial Sequence
  Q96I99 mitochondrial targeting peptide
MASPVAAQAGKLLRALALRPRFLAAGSQAVQLTSRRW

SEQ ID NO: 596 - protein, 39 aa, Artificial Sequence
  Q96IL0 mitochondrial targeting peptide
MLPCAAGARGRGAMVVLRAGKKTFLPPLCRAFACRGCQL

SEQ ID NO: 597 - protein, 15 aa, Artificial Sequence
  Q96MF6 mitochondrial targeting peptide
MAWAGSRRVPAGTRA

SEQ ID NO: 598 - protein, 36 aa, Artificial Sequence
  Q96PE7 mitochondrial targeting peptide
MARVLKAAAANAVGLFSRLQAPIPTVRASSTSQPLD

SEQ ID NO: 599 - protein, 41 aa, Artificial Sequence
  Q96Q11 mitochondrial targeting peptide
MLRCLYHWHRPVLNRRWSRLCLPKQYLFTMKLQSPEFQSLF

SEQ ID NO: 600 - protein, 35 aa, Artificial Sequence
  Q96QE5 mitochondrial targeting peptide
MSGSVLFTAGERWRCFLTPSRSSLYWALHNFCCRK

SEQ ID NO: 601 - protein, 36 aa, Artificial Sequence
  Q96RP9 mitochondrial targeting peptide
MRLLGAAAVAALGRGRAPASLGWQRKQVNWKACRWS

SEQ ID NO: 602 - protein, 41 aa, Artificial Sequence
  Q96RQ3 mitochondrial targeting peptide
MAAASAVSVLLVAAERNRWHRLPSLLLPPRTWVWRQRTMKY

SEQ ID NO: 603 - protein, 31 aa, Artificial Sequence
  Q96RR1 mitochondrial targeting peptide
MWVLLRSGYPLRILLPLRGEWMGRRGLPRNL

SEQ ID NO: 604 - protein, 57 aa, Artificial Sequence
  Q99551 mitochondrial targeting peptide
MQSLSLGQTSISKGLNYLTIMAPGNLWHMRNNFLFGSRCWMTRFSAENIFKSVSFRL

SEQ ID NO: 605 - protein, 29 aa, Artificial Sequence
  Q99643 mitochondrial targeting peptide
MAALLLRHVGRHCLRAHFSPQLCIRNAVP

SEQ ID NO: 606 - protein, 59 aa, Artificial Sequence
  Q99757 mitochondrial targeting peptide
MAQRLLLRRFLASVISRKPSQGQWPPLTSRALQTPQCSPGGLTVTPNPARTIYTTRISL

SEQ ID NO: 607 - protein, 40 aa, Artificial Sequence
  Q99766 mitochondrial targeting peptide
MCCAVSEQRLTCADQMMPFGKISQQLCGVKKLPWSCDSRY

SEQ ID NO: 608 - protein, 35 aa, Artificial Sequence
  Q99797 mitochondrial targeting peptide
MLCVGRLGGLGARAAALPPRRAGRGSLEAGIRARR

SEQ ID NO: 609 - protein, 27 aa, Artificial Sequence
  Q99798 mitochondrial targeting peptide
MAPYSLLVTRLQKALGVRQYHVASVLC

SEQ ID NO: 610 - protein, 35 aa, Artificial Sequence
  Q99807 mitochondrial targeting peptide
MSCAGAAAAPRLWRLRPGARRSLSAYGRRTSVRFR

SEQ ID NO: 611 - protein, 16 aa, Artificial Sequence
  Q9BQ52 mitochondrial targeting peptide
MWALCSLLRSAAGRTM

SEQ ID NO: 612 - protein, 48 aa, Artificial Sequence
  Q9BQ95 mitochondrial targeting peptide
MSWVQATLLARGLCRAWGGTCGAALTGTSISQVPRRLPRGLHCSAAAH

SEQ ID NO: 613 - protein, 13 aa, Artificial Sequence
  Q9BRT2 mitochondrial targeting peptide
MAASRYRRFLKLC

SEQ ID NO: 614 - protein, 35 aa, Artificial Sequence
  Q9BSE5 mitochondrial targeting peptide
MLRLLASGCARGPGPGVGARPAAGLFHPGRRQSRQ

SEQ ID NO: 615 - protein, 20 aa, Artificial Sequence
  Q9BT30 mitochondrial targeting peptide
MAGTGLLALRTLPGPSWVRG

SEQ ID NO: 616 - protein, 81 aa, Artificial Sequence
  Q9BUB7 mitochondrial targeting peptide
MLFLALGSPWAVELPLCGRRTALCAAAALRGPRASVSRASSSSGPSGPVAGWSTGPSGAARLLRRPGRAQIPVYWEGYVRF

SEQ ID NO: 617 - protein, 12 aa, Artificial Sequence
  Q9BUE6 mitochondrial targeting peptide
MSASLVRATVRA

SEQ ID NO: 618 - protein, 53 aa, Artificial Sequence
  Q9BV79 mitochondrial targeting peptide
MWVCSTLWRVRTPARQWRGLLPASGCHGPAASSYSASAEPARVRALVYGHHGD

SEQ ID NO: 619 - protein, 18 aa, Artificial Sequence
  Q9BVV7 mitochondrial targeting peptide
MICTFLRAVQYTEKLHRS

SEQ ID NO: 620 - protein, 46 aa, Artificial Sequence
  Q9BW91 mitochondrial targeting peptide
MAGRLLGKALAAVSLSLALASVTIRSSRCRGIQAFRNSFSSSWFHL

SEQ ID NO: 621 - protein, 17 aa, Artificial Sequence
  Q9BX68 mitochondrial targeting peptide
MAAAVVLAAGLRAARRA

SEQ ID NO: 622 - protein, 77 aa, Artificial Sequence
  Q9BXM7 mitochondrial targeting peptide
MAVRQALGRGLQLGRALLLRFTGKPGRAYGLGRPGPAAGCVRGERPGWAAGPGAEPRRVGLGLPNRLRFFRQSVAGL

SEQ ID NO: 623 - protein, 39 aa, Artificial Sequence
  Q9BYC2 mitochondrial targeting peptide
MAALRLLASVLGRGVPAGGSGLALSQGCARCFATSPRLR

SEQ ID NO: 624 - protein, 45 aa, Artificial Sequence
  Q9BYC9 mitochondrial targeting peptide
MVFLTAQLWLRNRVTDRYFRIQEVLKHARHFRGRKNRCYRLAVRT

SEQ ID NO: 625 - protein, 50 aa, Artificial Sequence
  Q9BYD6 mitochondrial targeting peptide
MAAAVRCMGRALIHHQRHSLSKMVYQTSLCSCSVNIRVPNRHFAAATKSA

SEQ ID NO: 626 - protein, 27 aa, Artificial Sequence
  Q9BYN8 mitochondrial targeting peptide
MLRALSRLGAGTPCRPRAPLVLPARGR

SEQ ID NO: 627 - protein, 37 aa, Artificial Sequence
  Q9BYT8 mitochondrial targeting peptide
MIARCLLAVRSLRRVGGSRILLRMTLGREVMSPLQAM

SEQ ID NO: 628 - protein, 41 aa, Artificial Sequence
  Q9BYV1 mitochondrial targeting peptide
MTLIWRHLLRPLCLVTSAPRILEMHPFLSLGTSRTSVTKLS

SEQ ID NO: 629 - protein, 46 aa, Artificial Sequence
  Q9BZ23 mitochondrial targeting peptide
MRRLGPFHPRVHWAAPPSLSSGLHRLLFLRGTRIPSSTTLSPPRHD

SEQ ID NO: 630 - protein, 29 aa, Artificial Sequence
  Q9BZE1 mitochondrial targeting peptide
MALASGPARRALAGSGQLGLGGFGAPRRG

SEQ ID NO: 631 - protein, 42 aa, Artificial Sequence
  Q9GZT6 mitochondrial targeting peptide
MNSRQAWRLFLSQGRGDRWVSRPRGHFSPALRREFFTTTTKE

SEQ ID NO: 632 - protein, 36 aa, Artificial Sequence
  Q9H078 mitochondrial targeting peptide
MLGSLVLRRKALAPRLLLRLLRSPTLRGHGGASGRN

SEQ ID NO: 633 - protein, 34 aa, Artificial Sequence
  Q9H1K1 mitochondrial targeting peptide
MAAAGAFRLRRAASALLLRSPRLPARELSAPARL

SEQ ID NO: 634 - protein, 31 aa, Artificial Sequence
  Q9H2K0 mitochondrial targeting peptide
MAALFLKRLTLQTVKSENSCIRCFGKHILQK

SEQ ID NO: 635 - protein, 32 aa, Artificial Sequence
  Q9H2U2 mitochondrial targeting peptide
MSALLRLLRTGAPAAACLRLGTSAGTGSRRAM

SEQ ID NO: 636 - protein, 52 aa, Artificial Sequence
  Q9H300 mitochondrial targeting peptide
MAWRGWAQRGWGCGQAWGASVGGRSCEELTAVLTPPQLLGRRFNFFIQQKCG

SEQ ID NO: 637 - protein, 47 aa, Artificial Sequence
  Q9H3H1 mitochondrial targeting peptide
MASVAAARAVPVGSGLRGLQRTLPLVVILGATGTGKSTLALQLGQRL

SEQ ID NO: 638 - protein, 35 aa, Artificial Sequence
  Q9H3J6 mitochondrial targeting peptide
MSTVGLFHFPTPLTRICPAPWGLRLWEKLTLLSPG

SEQ ID NO: 639 - protein, 44 aa, Artificial Sequence
  Q9H3K2 mitochondrial targeting peptide
MLAARLVCLRTLPSRVFHPAFTKASPVVKNSITKNQWLLTPSRE

SEQ ID NO: 640 - protein, 38 aa, Artificial Sequence
  Q9H3L0 mitochondrial targeting peptide
MANVLCNRARLVSYLPGFCSLVKRVVNPKAFSTAGSSG

SEQ ID NO: 641 - protein, 29 aa, Artificial Sequence
  Q9H4B0 mitochondrial targeting peptide
MLILTKTAGVFFKPSKRKVYEFLRSFNFH

SEQ ID NO: 642 - protein, 47 aa, Artificial Sequence
  Q9H4I9 mitochondrial targeting peptide
MASGAARWLVLAPVRSGALRSGPSLRKDGDVSAAWSGSGRSLVPSRS

SEQ ID NO: 643 - protein, 19 aa, Artificial Sequence
  Q9H5Q4 mitochondrial targeting peptide
MWIPVVGLPRRLRLSALAG

SEQ ID NO: 644 - protein, 29 aa, Artificial Sequence
  Q9H6R3 mitochondrial targeting peptide
MKPSWLQCRKVTSAGGLGGPLPGSSPARG

SEQ ID NO: 645 - protein, 19 aa, Artificial Sequence
  Q9H7H0 mitochondrial targeting peptide
MAAALKCLLTLGRWCPGLG

SEQ ID NO: 646 - protein, 37 aa, Artificial Sequence
  Q9H8M1 mitochondrial targeting peptide
MAARTGHTALRRVVSGCRPKSATAAGAQAPVRNGRYL

SEQ ID NO: 647 - protein, 30 aa, Artificial Sequence
  Q9H9J2 mitochondrial targeting peptide
MASGLVRLLQQGHRCLLAPVAPKLVPPVRG

SEQ ID NO: 648 - protein, 51 aa, Artificial Sequence
  Q9H9P8 mitochondrial targeting peptide
MVPALRYLVGACGRARGLFAGGSPGACGFASGRPRPLCGGSRSASTSSFDI

SEQ ID NO: 649 - protein, 17 aa, Artificial Sequence
  Q9HA92 mitochondrial targeting peptide
MALPGARARGWAAAARA

SEQ ID NO: 650 - protein, 38 aa, Artificial Sequence
  Q9HAC7 mitochondrial targeting peptide
MPSETHAMLATLARVAALRRTCLFSGRGGGRGLWTGRP

SEQ ID NO: 651 - protein, 27 aa, Artificial Sequence
  Q9HAV7 mitochondrial targeting peptide
MAAQCVRLARRSLPALALSLRPSPRLL

SEQ ID NO: 652 - protein, 47 aa, Artificial Sequence
  Q9HB07 mitochondrial targeting peptide
MGHQFLRGLLTLLLPPPPLYTRHRMLGPESVPPPKRSRSKLMAPPRI

SEQ ID NO: 653 - protein, 39 aa, Artificial Sequence
  Q9HBH1 mitochondrial targeting peptide
MARLWGALSLWPLWAAVPWGGAAAVGVRACSSTAAPDGV

SEQ ID NO: 654 - protein, 40 aa, Artificial Sequence
  Q9HC36 mitochondrial targeting peptide
MAALVRPARFVVRPLLQVVQAWDLDARRWVRALRRSPVKV

SEQ ID NO: 655 - protein, 22 aa, Artificial Sequence
  Q9HCC0 mitochondrial targeting peptide
MWAVLRLALRPCARASPAGPRA

SEQ ID NO: 656 - protein, 49 aa, Artificial Sequence
  Q9HD23 mitochondrial targeting peptide
MECLRSLPCLLPRAMRLPRRTLCALALDVTSVGPPVAACGRRANLIGRS

SEQ ID NO: 657 - protein, 36 aa, Artificial Sequence
  Q9NNW7 mitochondrial targeting peptide
MAAMAVALRGLGGRFRWRTQAVAGGVRGAARGAAAG

SEQ ID NO: 658 - protein, 34 aa, Artificial Sequence
  Q9NP81 mitochondrial targeting peptide
MAASMARRLWPLLTRRGFRPRGGCISNDSPRRSF

SEQ ID NO: 659 - protein, 31 aa, Artificial Sequence
  Q9NPB1 mitochondrial targeting peptide
MIRLGGWCARRLCSAAVPAGRRGAAGGLGLA

SEQ ID NO: 660 - protein, 32 aa, Artificial Sequence
  Q9NPH0 mitochondrial targeting peptide
MITGVFSMRLWTPVGVLTSLAYCLHQRRVALA

SEQ ID NO: 661 - protein, 46 aa, Artificial Sequence
  Q9NQ50 mitochondrial targeting peptide
MTASVLRSISLALRPTSGLLGTWQTQLRETHQRASLLSFWELIPMR

SEQ ID NO: 662 - protein, 58 aa, Artificial Sequence
  Q9NQZ5 mitochondrial targeting peptide
MLPRRLLAAWLAGTRGGGLLALLANQCRFVTGLRVRRAQQIAQLYGRLYSESSRRVLL

SEQ ID NO: 663 - protein, 55 aa, Artificial Sequence
  Q9NR28 mitochondrial targeting peptide
MAALKSWLSRSVTSFFRYRQCLCVPVVANFKKRCFSELIRPWHKTVTIGFGVTLC

SEQ ID NO: 664 - protein, 105 aa, Artificial Sequence
  Q9NRK6 mitochondrial targeting peptide
MRGPPAWPLRLLEPPSPAEPGRLLPVACVWAAASRVPGSLSPFTGLRPARLWGAGPALLWGVGAARRWRSGCRGGGPGASRGVLGLARLLGLWARGPGSCRCGAF

SEQ ID NO: 665 - protein, 30 aa, Artificial Sequence
  Q9NRP4 mitochondrial targeting peptide
MPGRHVSRVRALYKRVLQLHRVLPPDLKSL

SEQ ID NO: 666 - protein, 8 aa, Artificial Sequence
  Q9NRX2 mitochondrial targeting peptide
MRLSVAAA

SEQ ID NO: 667 - protein, 19 aa, Artificial Sequence
  Q9NS18 mitochondrial targeting peptide
MIWRRAALAGTRLVWSRSG

SEQ ID NO: 668 - protein, 48 aa, Artificial Sequence
  Q9NSE4 mitochondrial targeting peptide
MRWGLRPRGPGAAALATARSLWGTPRLPCSPGWQGATKRLLVRSVSGA

SEQ ID NO: 669 - protein, 37 aa, Artificial Sequence
  Q9NUB1 mitochondrial targeting peptide
MAARTLGRGVGRLLGSLRGLSGQPARPPCGVSAPRRA

SEQ ID NO: 670 - protein, 52 aa, Artificial Sequence
  Q9NUJ1 mitochondrial targeting peptide
MAVARLAAVAAWVPCRSWGWAAVPFGPHRGLSVLLARIPQRAPRWLPACRQK

SEQ ID NO: 671 - protein, 55 aa, Artificial Sequence
  Q9NUT2 mitochondrial targeting peptide
MLVHLFRVGIRGGPFPGRLLPPLRFQTFSAVRNTWRNGKTGQLHKAEGEYSDGYR

SEQ ID NO: 672 - protein, 15 aa, Artificial Sequence
  Q9NVH6 mitochondrial targeting peptide
MWYHRLSHLHSRLQD

SEQ ID NO: 673 - protein, 34 aa, Artificial Sequence
  Q9NVS2 mitochondrial targeting peptide
MAALKALVSGCGRLLRGLLAGPAATSWSRLPARG

SEQ ID NO: 674 - protein, 37 aa, Artificial Sequence
  Q9NVV4 mitochondrial targeting peptide
MAVPGVGLLTRLNLCARRRTRVQRPIVRLLSCPGTVA

SEQ ID NO: 675 - protein, 35 aa, Artificial Sequence
  Q9NWR8 mitochondrial targeting peptide
MLQRGLWPWRTRLLPTPGTWRPARPWPLPPPPQVL

SEQ ID NO: 676 - protein, 12 aa, Artificial Sequence
  Q9NWS8 mitochondrial targeting peptide
MPATLLRAVARS

SEQ ID NO: 677 - protein, 27 aa, Artificial Sequence
  Q9NWU1 mitochondrial targeting peptide
MSNCLQNFLKITSTRLLCSRLCQQLRS

SEQ ID NO: 678 - protein, 40 aa, Artificial Sequence
  Q9NWU5 mitochondrial targeting peptide
MAAAVLGQLGALWIHNLRSRGKLALGVLPQSYIHTSASLD

SEQ ID NO: 679 - protein, 29 aa, Artificial Sequence
  Q9NX14 mitochondrial targeting peptide
MAAGLFGLSARRLLAAAATRGLPAARVRW

SEQ ID NO: 680 - protein, 29 aa, Artificial Sequence
  Q9NX18 mitochondrial targeting peptide
MAVSTVFSTSSLMLALSRHSLLSPLLSVT

SEQ ID NO: 681 - protein, 36 aa, Artificial Sequence
  Q9NX20 mitochondrial targeting peptide
MWRLLARASAPLLRVPLSDSWALLPASAGVKTLLPV

SEQ ID NO: 682 - protein, 27 aa, Artificial Sequence
  Q9NX46 mitochondrial targeting peptide
MAAAAMAAAAGGGAGAARSLSRFRGCL

SEQ ID NO: 683 - protein, 36 aa, Artificial Sequence
  Q9NXA8 mitochondrial targeting peptide
MRPLQIVPSRLISQLYCGLKPPASTRNQICLKMARP

SEQ ID NO: 684 - protein, 85 aa, Artificial Sequence
  Q9NZJ6 mitochondrial targeting peptide
MWSGRKLGSSGGWFLRVLGPGGCNTKAARPLISSAVYVKNQLSGTLQIKPGVFNEYRTIWFKSYRTIFSCLNRIKSFRYPWARLY

SEQ ID NO: 685 - protein, 21 aa, Artificial Sequence
  Q9P015 mitochondrial targeting peptide
MAGPLQGGGARALDLLRGLPR

SEQ ID NO: 686 - protein, 71 aa, Artificial Sequence
  Q9P0J1 mitochondrial targeting peptide
MPAPTQLFFPLIRNCELSRIYGTACYCHHKHLCCSSSYIPQSRLRYTPHPAYATFCRPKENWWQYTQGRRY

SEQ ID NO: 687 - protein, 66 aa, Artificial Sequence
  Q9P2J9 mitochondrial targeting peptide
MSSTVSYWILNSTRNSIATLQGGRRLYSRYVSNRNKLKWRLFSRVPPTLNSSPCGGFTLCKAYRHT

SEQ ID NO: 688 - protein, 52 aa, Artificial Sequence
  Q9P2R7 mitochondrial targeting peptide
MAASMFYGRLVAVATLRNHRPRTAQRAAAQVLGSSGLFNNHGLQVQQQQQRN

SEQ ID NO: 689 - protein, 32 aa, Artificial Sequence
  Q9UDR5 mitochondrial targeting peptide
MLQVHRTGLGRLGVSLSKGLHHKAVLAVRRED

SEQ ID NO: 690 - protein, 26 aa, Artificial Sequence
  Q9UGC7 mitochondrial targeting peptide
MRSRVLWGAARWLWPRRAVGPARRPL

SEQ ID NO: 691 - protein, 18 aa, Artificial Sequence
  Q9UGM6 mitochondrial targeting peptide
MALHSMRKARERWSFIRA

SEQ ID NO: 692 - protein, 50 aa, Artificial Sequence
  Q9UI17 mitochondrial targeting peptide
MLRPGAQLLRGLLLRSCPLQGSPGRPRSVCGREGEEKPPLSAETQWKDRA

SEQ ID NO: 693 - protein, 14 aa, Artificial Sequence
  Q9UI32 mitochondrial targeting peptide
MRSMKALQKALSRA

SEQ ID NO: 694 - protein, 18 aa, Artificial Sequence
  Q9UI43 mitochondrial targeting peptide
MAGYLKLVCVSFQRQGFH

SEQ ID NO: 695 - protein, 25 aa, Artificial Sequence
  Q9UII2 mitochondrial targeting peptide
MAVTALAARTWLGVWGVRTMQARGF

SEQ ID NO: 696 - protein, 23 aa, Artificial Sequence
  Q9UJ68 mitochondrial targeting peptide
MLSATRRACQLLLLHSLFPVPRM

SEQ ID NO: 697 - protein, 28 aa, Artificial Sequence
  Q9UJZ1 mitochondrial targeting peptide
MLARAARGTGALLLRGSLLASGRAPRRA

SEQ ID NO: 698 - protein, 22 aa, Artificial Sequence
  Q9UKU7 mitochondrial targeting peptide
MLWSGCRRFGARLGCLPGGLRV

SEQ ID NO: 699 - protein, 22 aa, Artificial Sequence
  Q9UL12 mitochondrial targeting peptide
MASLSRALRVAAAHPRQSPTRG

SEQ ID NO: 700 - protein, 73 aa, Artificial Sequence
  Q9ULD0 mitochondrial targeting peptide
MSQLRLLPSRLGVQAARLLAAHDVPVFGWRSRSSGPPATFPSSKGGGGSSYMEEMYFAWLENPQSVHKSWDSF

SEQ ID NO: 701 - protein, 9 aa, Artificial Sequence
  Q9UMS0 mitochondrial targeting peptide
MAATARRGW

SEQ ID NO: 702 - protein, 25 aa, Artificial Sequence
  Q9Y234 mitochondrial targeting peptide
MLIPFSMKNCFQLLCNCQVPAAGFK

SEQ ID NO: 703 - protein, 41 aa, Artificial Sequence
  Q9Y2C4 mitochondrial targeting peptide
MAIKSIASRLRGSRRFLSGFVAGAVVGAAGAGLAALQFFRS

SEQ ID NO: 704 - protein, 33 aa, Artificial Sequence
  Q9Y2D0 mitochondrial targeting peptide
MVVMNSLRVILQASPGKLLWRKFQIPRFMPARP

SEQ ID NO: 705 - protein, 71 aa, Artificial Sequence
  Q9Y2Q9 mitochondrial targeting peptide
MAALCRTRAVAAESHFLRVFLFFRPFRGVGTESGSESGSSNAKEPKTRAGGFASALERHSELLQKVEPLQK

SEQ ID NO: 706 - protein, 20 aa, Artificial Sequence
  Q9Y2R5 mitochondrial targeting peptide
MSVVRSSVHARWIVGKVIGT

SEQ ID NO: 707 - protein, 37 aa, Artificial Sequence
  Q9Y2R9 mitochondrial targeting peptide
MAAPAVKVARGWSGLALGVRRAVLQLPGLTQVRWSRY

SEQ ID NO: 708 - protein, 25 aa, Artificial Sequence
  Q9Y2Z2 mitochondrial targeting peptide
MFYFRGCGRWVAVSFTKQQFPLARL

SEQ ID NO: 709 - protein, 16 aa, Artificial Sequence
  Q9Y2Z4 mitochondrial targeting peptide
MAAPILRSFSWGRWSG

SEQ ID NO: 710 - protein, 28 aa, Artificial Sequence
  Q9Y2Z9 mitochondrial targeting peptide
MAARLVSRCGAVRAAPHSGPLVSWRRWS

SEQ ID NO: 711 - protein, 21 aa, Artificial Sequence
  Q9Y305 mitochondrial targeting peptide
MRRAALRLCALGKGQLTPGRG

SEQ ID NO: 712 - protein, 24 aa, Artificial Sequence
  Q9Y375 mitochondrial targeting peptide
MALVHKLLRGTYFLRKFSKPTSAL

SEQ ID NO: 713 - protein, 30 aa, Artificial Sequence
  Q9Y3A0 mitochondrial targeting peptide
MATLLRPVLRRLCGLPGLQRPAAEMPLRAR

SEQ ID NO: 714 - protein, 25 aa, Artificial Sequence
  Q9Y3B8 mitochondrial targeting peptide
MLGGSLGSRLLRGVGGSHGRFGARG

SEQ ID NO: 715 - protein, 20 aa, Artificial Sequence
  Q9Y3D2 mitochondrial targeting peptide
MARLLWLLRGLTLGTAPRRA

SEQ ID NO: 716 - protein, 34 aa, Artificial Sequence
  Q9Y3D3 mitochondrial targeting peptide
MVHLTTLLCKAYRGGHLTIRLALGGCTNRPFYRI

SEQ ID NO: 717 - protein, 62 aa, Artificial Sequence
  Q9Y3E5 mitochondrial targeting peptide
MPSKSLVMEYLAHPSTLGLAVGVACGMCLGWSLRVCFGMLPKSKTSKTHTDTESEASILGDS

SEQ ID NO: 718 - protein, 28 aa, Artificial Sequence
  Q9Y6E7 mitochondrial targeting peptide
MKMSFALTFRSAKGRWIANPSQPCSKAS

SEQ ID NO: 719 - protein, 32 aa, Artificial Sequence
  Q9Y6G3 mitochondrial targeting peptide
MAVAAVKWVMSKRTILKHLFPVQNGALYCVCH

SEQ ID NO: 720 - RNA, 87 nt, Artificial Sequence
  miR-142
gacagugcagucacccauaaaguagaaagcacuacuaacagcacuggaggguguaguguuuccuacuuuauggaugaguguacugug

SEQ ID NO: 721 - RNA, 23 nt, Artificial Sequence
  miR-142-3p
uguaguguuuccuacuuuaugga

SEQ ID NO: 722 - RNA, 23 nt, Artificial Sequence
  miR-142-3p binding site
uccauaaaguaggaaacacuaca

SEQ ID NO: 723 - RNA, 21 nt, Artificial Sequence
  miR-142-5p
cauaaaguagaaagcacuacu

SEQ ID NO: 724 - RNA, 21 nt, Artificial Sequence
  miR-142-5p binding site
aguagugcuuucuacuuuaug

SEQ ID NO: 725 - DNA, 142 bp, Artificial Sequence
  Upstream UTR including miR142-3p
tgataatagtccataaagtaggaaacactacagctggagcctcggtggccatgcttcttgccccttgggcctccccccagcccctcctccccttcctgcacccgtacccccgtggtctttgaataaagtctgagtgggcggc

SEQ ID NO: 726 - DNA, 142 bp, Artificial Sequence
  Upstream UTR including miR142-3p
tgataataggctggagcctcggtggctccataaagtaggaaacactacacatgcttcttgccccttgggcctccccccagcccctcctccccttcctgcacccgtacccccgtggtctttgaataaagtctgagtgggcggc

SEQ ID NO: 727 - DNA, 142 bp, Artificial Sequence
  Upstream UTR including miR142-3p
tgataataggctggagcctcggtggccatgcttcttgccccttccataaagtaggaaacactacatgggcctccccccagcccctcctccccttcctgcacccgtacccccgtggtctttgaataaagtctgagtgggcggc

SEQ ID NO: 728 - DNA, 142 bp, Artificial Sequence
  Upstream UTR including miR142-3p
tgataataggctggagcctcggtggccatgcttcttgccccttgggcctccccccagtccataaagtaggaaacactacacccctcctccccttcctgcacccgtacccccgtggtctttgaataaagtctgagtgggcggc

SEQ ID NO: 729 - DNA, 142 bp, Artificial Sequence
  Upstream UTR including miR142-3p
tgataataggctggagcctcggtggccatgcttcttgccccttgggcctccccccagcccctcctccccttctccataaagtaggaaacactacactgcacccgtacccccgtggtctttgaataaagtctgagtgggcggc

SEQ ID NO: 730 - DNA, 142 bp, Artificial Sequence
  Upstream UTR including miR142-3p
tgataataggctggagcctcggtggccatgcttcttgccccttgggcctccccccagcccctcctccccttcctgcacccgtaccccctccataaagtaggaaacactacagtggtctttgaataaagtctgagtgggcggc

SEQ ID NO: 731 - DNA, 142 bp, Artificial Sequence
  Upstream UTR including miR142-3p
tgataataggctggagcctcggtggccatgcttcttgccccttgggcctccccccagcccctcctccccttcctgcacccgtacccccgtggtctttgaataaagttccataaagtaggaaacactacactgagtgggcggc

SEQ ID NO: 732 - DNA, 2250 bp, Artificial Sequence
  Codon optimized sequence that encodes an MCM polypeptide with the I671V mutation
atgctgcgggccaagaaccagctgttcctgctgagccctcactacctgcggcaggtgaaggagagcagcggcagccggctgatccagcagcggctgctgcaccagcagcagcccctgcaccccgagtgggccgccctggccaagaagcagctgaagggcaagaaccccgaggacctgatctggcacacgcccgagggcatcagcatcaagcccctgtacagcaagcgggacaccatggacctgcccgaggagctgcccggcgtgaagcccttcacccggggcccctaccccaccatgtacaccttccggccctggaccatccggcagtacgccggcttcagcaccgtggaggagagcaacaagttctacaaggacaacatcaaggccggccagcagggcctgagcgtggccttcgacctggccacccaccggggctacgacagcgacaacccacgggtgcggggcgacgtgggcatggccggcgtggccatcgacaccgtggaggacaccaagatcctgttcgacggcatccctctggagaagatgagcgtgagcatgaccatgaacggcgccgtgatccccgtgctggccaacttcatcgtgaccggcgaggagcagggcgtgcccaaggagaagctgaccggcaccatccagaacgacatcctgaaggagttcatggtgcggaacacctacatcttccctcccgagcccagcatgaagatcatcgccgacatcttcgagtacaccgccaagcacatgcccaagttcaacagcatcagcatcagcggctaccacatgcaggaggccggcgccgacgccatcctggagctggcctacaccctggccgacggcctggagtacagccggaccggcctgcaggccggcctgaccatcgacgagttcgcgccccggctgagcttcttctggggcatcggcatgaacttctacatggagatcgccaagatgcgggccggccggcggctgtgggcccacctgatcgagaagatgttccagcccaagaacagcaagagcctgctgctgcgggcccactgccagaccagcggctggagcctgaccgagcaggacccctacaacaacatcgtgcggaccgccatcgaggccatggccgccgtgttcggcggcacccagagcctgcacaccaacagcttcgacgaggccctgggcctgcccaccgtgaagagcgcccggatcgcccggaacacccagatcatcatccaggaggagagcggcatccccaaggtggccgacccctggggcggcagctacatgatggagtgcctgaccaacgacgtgtacgacgccgccctgaagctgatcaacgagatcgaggagatgggcggcatggccaaggccgtggccgagggcatccccaagctgcggatcgaggagtgcgccgcccggcggcaggcccggatcgacagcggcagcgaggtgatcgtgggcgtgaacaagtaccagctggagaaggaggacgccgtggaggtgctggccatcgacaacaccagcgtgcggaaccggcagatcgagaagctgaagaagatcaagagcagccgggaccaggccctggccgagcggtgcctggccgccctgaccgagtgcgccgccagcggcgacggcaacatcctggccctggccgtggacgccagccgggcccggtgcaccgtgggcgagatcaccgacgccctgaagaaggtgttcggcgagcacaaggccaacgaccggatggtgagcggcgcctaccggcaggagttcggcgagagcaaggagatcaccagcgccatcaagcgggtgcacaagttcatggagcgggagggccggcggccccggctgctggtggccaagatgggccaggacggccacgaccggggcgccaaggtgatcgccaccggcttcgccgacctgggcttcgacgtggacatcggcccactgttccagacgccccgggaggtggcccagcaggccgtggacgccgacgtgcacgccgtgggcgtgagcaccctggccgccggccacaagaccctggtgcccgagctgatcaaggagctgaacagcctgggccggcccgacatcctggtgatgtgcggcggcgtgatcccgccccaggactacgagttcctgttcgaggtgggcgtgagcaacgtgttcggccccggcacccggatccccaaggccgccgtgcaggtgctggacgacatcgagaagtgcctggagaagaagcagcagagcgtg

SEQ ID NO: 733 - DNA, 2250 bp, Artificial Sequence
  Codon optimized sequence that encodes an MCM polypeptide with the I671V mutation
atgctgcgggccaagaaccagctgttcctgctgagcccgcactacctgcggcaggtgaaggagagcagcggcagccggctgatccagcagcgcctcctccaccagcagcagcccctccaccccgagtgggccgccctcgccaagaagcagctcaagggcaagaaccccgaggacctcatctggcacacgcccgagggcatctccatcaagcccctctactccaagcgcgacaccatggacctccccgaggagctccccggcgtcaagcccttcacccgcggcccctaccccaccatgtacaccttccgcccctggaccatccgccagtacgccggcttctccaccgtcgaggagtccaacaagttctacaaggacaacatcaaggccggccagcagggcctctccgtcgccttcgacctcgccacccaccgcggctacgactccgacaacccgcgcgtccgcggcgacgtcggcatggccggcgtcgccatcgacaccgtcgaggacaccaagatcctcttcgacggcatccctctcgagaagatgtccgtctccatgaccatgaacggcgccgtcatccccgtcctcgccaacttcatcgtcaccggcgaggagcagggcgtccccaaggagaagctcaccggcaccatccagaacgacatcctcaaggagttcatggtccgcaacacctacatcttccctcccgagccctccatgaagatcatcgccgacatcttcgagtacaccgccaagcacatgcccaagttcaactccatctccatctccggctaccacatgcaggaggccggcgccgacgccatcctcgagctcgcctacaccctcgccgacggcctcgagtactcccgcaccggcctccaggccggcctcaccatcgacgagttcgcgccccgcctctccttcttctggggcatcggcatgaacttctacatggagatcgccaagatgcgcgccggccgccgcctctgggcccacctcatcgagaagatgttccagcccaagaactccaagtccctcctcctccgcgcccactgccagacctccggctggtccctcaccgagcaggacccctacaacaacatcgtccgcaccgccatcgaggccatggccgccgtcttcggcggcacccagtccctccacaccaactccttcgacgaggccctcggcctccccaccgtcaagtccgcccgcatcgcccgcaacacccagatcatcatccaggaggagtccggcatccccaaggtcgccgacccctggggcggctcctacatgatggagtgcctcaccaacgacgtctacgacgccgccctcaagctcatcaacgagatcgaggagatgggcggcatggccaaggccgtcgccgagggcatccccaagctccgcatcgaggagtgcgccgcccgccgccaggcccgcatcgactccggctccgaggtcatcgtcggcgtcaacaagtaccagctcgagaaggaggacgccgtcgaggtcctcgccatcgacaacacctccgtccgcaaccgccagatcgagaagctcaagaagatcaagtcctcccgcgaccaggccctcgccgagcgctgcctcgccgccctcaccgagtgcgccgcctccggcgacggcaacatcctcgccctcgccgtcgacgcctcccgcgcccgctgcaccgtcggcgagatcaccgacgccctcaagaaggtcttcggcgagcacaaggccaacgaccgcatggtctccggcgcctaccgccaggagttcggcgagtccaaggagatcacctccgccatcaagcgcgtccacaagttcatggagcgcgagggccgccgcccgcgcctcctcgtcgccaagatgggccaggacggccacgaccgcggcgccaaggtcatcgccaccggcttcgccgacctcggcttcgacgtcgacatcggcccactcttccagacgccccgcgaggtcgcccagcaggccgtcgacgccgacgtccacgccgtcggcgtctccaccctcgccgccggccacaagaccctcgtccccgagctcatcaaggagctcaactccctcggccgccccgacatcctcgtcatgtgcggcggcgtcatccctccccaggactacgagttcctcttcgaggtcggcgtctccaacgtcttcggccccggcacccgcatccccaaggccgccgtccaggtcctcgacgacatcgagaagtgcctcgagaagaagcagcagtccgtc

SEQ ID NO: 734 - DNA, 2250 bp, Artificial Sequence
  Codon optimized sequence that encodes an MCM polypeptide with the I671V mutation
atgctgcgggccaagaaccagctgttcctgctgagcccccactacctgcggcaggtgaaggagagcagcggcagccggctgatccagcagcggctgctgcaccagcagcagcccctgcaccccgagtgggccgccctggccaagaagcagctgaagggcaagaaccccgaggacctgatctggcacacccccgagggcatcagcatcaagcccctgtacagcaagcgggacaccatggacctgcccgaggagctgcccggcgtgaagcccttcacccggggcccctaccccaccatgtacaccttccggccctggaccatccggcagtacgccggcttcagcaccgtggaggagagcaacaagttctacaaggacaacatcaaggccggccagcagggcctgagcgtggccttcgacctggccacccaccggggctacgacagcgacaacccccgggtgcggggcgacgtgggcatggccggcgtggccatcgacaccgtggaggacaccaagatcctgttcgacggcatccccctggagaagatgagcgtgagcatgaccatgaacggcgccgtgatccccgtgctggccaacttcatcgtgaccggcgaggagcagggcgtgcccaaggagaagctgaccggcaccatccagaacgacatcctgaaggagttcatggtgcggaacacctacatcttcccccccgagcccagcatgaagatcatcgccgacatcttcgagtacaccgccaagcacatgcccaagttcaacagcatcagcatcagcggctaccacatgcaggaggccggcgccgacgccatcctggagctggcctacaccctggccgacggcctggagtacagccggaccggcctgcaggccggcctgaccatcgacgagttcgccccccggctgagcttcttctggggcatcggcatgaacttctacatggagatcgccaagatgcgggccggccggcggctgtgggcccacctgatcgagaagatgttccagcccaagaacagcaagagcctgctgctgcgggcccactgccagaccagcggctggagcctgaccgagcaggacccctacaacaacatcgtgcggaccgccatcgaggccatggccgccgtgttcggcggcacccagagcctgcacaccaacagcttcgacgaggccctgggcctgcccaccgtgaagagcgcccggatcgcccggaacacccagatcatcatccaggaggagagcggcatccccaaggtggccgacccctggggcggcagctacatgatggagtgcctgaccaacgacgtgtacgacgccgccctgaagctgatcaacgagatcgaggagatgggcggcatggccaaggccgtggccgagggcatccccaagctgcggatcgaggagtgcgccgcccggcggcaggcccggatcgacagcggcagcgaggtgatcgtgggcgtgaacaagtaccagctggagaaggaggacgccgtggaggtgctggccatcgacaacaccagcgtgcggaaccggcagatcgagaagctgaagaagatcaagagcagccgggaccaggccctggccgagcggtgcctggccgccctgaccgagtgcgccgccagcggcgacggcaacatcctggccctggccgtggacgccagccgggcccggtgcaccgtgggcgagatcaccgacgccctgaagaaggtgttcggcgagcacaaggccaacgaccggatggtgagcggcgcctaccggcaggagttcggcgagagcaaggagatcaccagcgccatcaagcgggtgcacaagttcatggagcgggagggccggcggccccggctgctggtggccaagatgggccaggacggccacgaccggggcgccaaggtgatcgccaccggcttcgccgacctgggcttcgacgtggacatcggccccctgttccagaccccccgggaggtggcccagcaggccgtggacgccgacgtgcacgccgtgggcgtgagcaccctggccgccggccacaagaccctggtgcccgagctgatcaaggagctgaacagcctgggccggcccgacatcctggtgatgtgcggcggcgtgatccccccccaggactacgagttcctgttcgaggtgggcgtgagcaacgtgttcggccccggcacccggatccccaaggccgccgtgcaggtgctggacgacatcgagaagtgcctggagaagaagcagcagagcgtg

SEQ ID NO: 735 - DNA, 2250 bp, Artificial Sequence
  Codon optimized sequence that encodes an MCM polypeptide with the I671V mutation
atgctgagggccaagaaccagctgttcctgctcagcccccactacctgcgccaggtgaaggagtcctccggctcccggctgatccagcagaggctcctgcaccagcagcaacccctgcatccggagtgggccgccctcgccaagaaacagttgaaaggcaagaaccccgaggatctcatctggcatacccccgagggcatcagcatcaagccgctgtacagcaagagggacaccatggatctcccggaagagctgcctggcgtgaagcccttcacccggggtccctaccccacgatgtacaccttccgcccctggaccatcaggcagtacgcgggctttagcacggtcgaggagagcaacaaattctacaaggacaacatcaaggcgggccagcagggcctgagcgtggccttcgacctagccacccaccggggctatgacagcgacaacccacgggtcaggggcgacgtgggcatggcgggcgtggccatagacaccgtggaggacaccaagatcctgttcgacgggatcccacttgagaagatgagcgtgtccatgaccatgaacggcgccgtcatccccgtgctggccaacttcatcgtgaccggcgaggagcagggcgtgcccaaggagaagctgaccggcaccatacagaacgacatcctgaaggagtttatggtgcgcaacacctatatcttcccccccgaacccagcatgaagatcatcgccgacatcttcgagtacaccgcgaagcacatgcccaagttcaactccatcagcatcagcggctaccatatgcaggaggccggtgcggacgccatcctggagcttgcctacaccctggccgacgggctggagtacagcaggaccgggctccaggccggtctgaccatcgacgaattcgcccccaggctgagcttcttctggggcatcggcatgaacttctacatggagatcgccaaaatgagggccggcaggaggctctgggcccacctgatcgaaaaaatgttccagcccaaaaacagcaaatccctgctgctgcgggcccactgccagaccagcggctggagcctcaccgagcaagacccctataataacatcgtcaggacggccatcgaagcgatggccgccgtgttcggaggcacccagagcctccataccaacagcttcgacgaggccctggggctgccgacggtgaaaagcgccaggatcgccaggaacacgcagatcatcatccaggaggagagcggtatccccaaggtggccgacccgtggggtggcagctacatgatggagtgcctcacgaacgacgtgtatgacgccgcgctgaaactgatcaacgagatcgaggagatgggggggatggccaaggccgtggctgagggtattcccaagctgcgcatagaggagtgcgccgccaggcgccaggccaggatcgactccgggtccgaggtaatcgtcggcgtgaacaagtaccagctggagaaggaggacgccgtggaggtgctggcaatcgacaacaccagcgtgaggaaccggcagatcgaaaagctgaagaagattaaaagcagccgggaccaagccctggcagagaggtgcctggccgccctgacggaatgcgccgcctccggggacggcaacatcctggctctggccgtggacgctagccgcgccaggtgcaccgtcggcgagatcaccgacgccctgaagaaggtgttcggggagcacaaggcgaacgaccgcatggtgtccggcgcctatcggcaagagttcggggagagcaaggaaataaccagcgccatcaaacgtgtgcacaagttcatggaaagggagggcaggcgcccgaggctcctcgtcgccaagatgggccaggatgggcacgacaggggagccaaagtcatcgccaccgggtttgcggacctggggttcgacgtggacatcggccccctgttccagacgccgagggaggtggcccaacaggccgtggacgccgacgtgcacgccgtgggcgtgagcacgctcgccgcggggcacaagaccctggtgcccgagctgattaaggagctgaacagcctgggccgacccgacatcctggtgatgtgcgggggcgtgatccccccgcaggactacgaattcctgttcgaggtgggagtcagcaacgtgttcgggcccggtacgaggatcccgaaggccgccgtgcaggtgctggacgacatcgagaaatgcctggagaagaaacagcagtccgtg

SEQ ID NO: 736 - DNA, 2250 bp, Artificial Sequence
  Codon optimized sequence that encodes an MCM polypeptide with the I671V mutation
atgctgcgggccaaaaaccagctgttcctgctctccccccactacctgcggcaggtgaaggagagctccggaagcaggctcatacagcagcgcctgctccaccagcagcagcccctgcaccccgagtgggccgctctggctaagaaacagctgaagggcaaaaatcccgaggacctgatctggcatacccccgagggcatcagcatcaaacccctgtatagcaaacgggacaccatggacctcccggaggagctgcccggagttaagcccttcaccaggggcccctatccaacaatgtacaccttccggccctggaccatccgacagtacgccggcttcagcacggtcgaggagtccaacaagttctataaggacaacatcaaggccgggcagcagggcctgagcgtcgccttcgacctggccacccaccgtgggtacgacagcgacaaccccagggtgcggggcgacgtgggcatggccggcgtggccatagataccgtggaggacaccaagatcctgtttgacggcatccccctggagaagatgagcgtgtccatgacaatgaacggcgccgtgatccccgtgctcgccaatttcatagtgaccggcgaggagcagggcgtgccgaaggagaagttgaccggaacaatccagaacgacatcctgaaggagttcatggtgcggaacacctacatcttcccccccgagccgtcaatgaagatcatcgccgacatcttcgagtacaccgccaagcacatgcccaagttcaacagcatcagcatcagcggctatcatatgcaggaggccggggccgacgccatcctggagctggcttacacgctggccgacggcctggagtattccaggaccggcttacaagccggcctgaccatcgacgagttcgcccccaggctgagcttcttctggggcatcggcatgaacttttacatggagatcgccaagatgcgagccggcaggcggctgtgggcccacctgattgagaaaatgttccagcccaagaactctaagtccctgctgctgcgagcccactgccagaccagcggctggagcctgaccgagcaggacccctacaacaatatcgtgcgcaccgccatcgaagcgatggccgccgtgtttggcggcactcagagcctgcacaccaactcctttgacgaggccctgggcctgcccaccgtgaagagtgccaggatagcgaggaacacccaaatcataatacaggaggagtccgggatccccaaggtggccgacccctggggcggctcctacatgatggagtgcctgaccaacgatgtctacgacgccgccctgaaactgatcaacgagatcgaggagatgggaggcatggccaaggccgtggctgagggcatccccaagctgaggatcgaggagtgcgcagcccgtcgtcaggcccgcatcgacagcggctccgaggtgatcgtcggcgtgaacaagtaccagctcgaaaaagaggatgccgtggaagtgctggccatcgacaacacgtccgtccgcaataggcagatcgagaaactgaagaagatcaagtcgtccagggaccaggccctggccgagagatgcctggccgccctgacggaatgcgccgccagcggggatggcaatatcctggccctggccgtggacgcctcccgggccaggtgcacagtgggggagatcaccgacgcgctcaagaaggtgtttggcgagcacaaggccaacgataggatggtgagcggcgcgtacaggcaggagttcggcgagtccaaggagatcaccagcgccatcaagagagtgcacaagttcatggagcgggaggggcggaggccgaggctgctcgtggcgaagatgggccaagacgggcacgacaggggcgccaaggttatcgccaccgggtttgcagacctgggcttcgacgtggacatcggccccctctttcagaccccccgagaagtggcacaacaggccgtggacgccgacgtgcacgccgtgggcgtaagcaccctggccgccggccataaaaccctggtgccggagctgatcaaggagctcaacagcctgggccgacccgacatcctggtgatgtgtgggggtgtgattcctccccaggattacgagttcctgttcgaggtgggcgtgagcaatgtcttcggcccggggaccaggatacccaaggcggccgtccaggtgctcgacgacattgagaagtgcctcgagaagaaacagcagtccgtg

SEQ ID NO: 737 - DNA, 2250 bp, Artificial Sequence
  Codon optimized sequence that encodes an MCM polypeptide with the I671V mutation
atgctcagagccaaaaaccagctgttcctgctcagcccccactatctgaggcaggtgaaggagagctcagggtccaggctgatccaacagcgcctgctccaccaacagcagccgctccatcccgagtgggccgccctggccaagaaacagctgaaggggaagaatcctgaggacctgatctggcacacccccgagggaatcagcatcaagcccctgtactccaagagggacaccatggacctgcccgaggagctgccgggcgtgaagccctttaccaggggaccctacccgacgatgtacacctttcggccctggaccatcaggcagtacgccggcttctccaccgtggaggagagcaacaagttctacaaggacaacatcaaagcgggccaacagggtctgagcgtggccttcgatctggccacgcacaggggctacgacagcgacaaccccagggtccggggcgacgtgggcatggccggcgtggccatcgacacggtggaggacaccaagatcctgttcgacggcatccccctggagaaaatgtccgttagcatgaccatgaatggggccgtcatcccggtgctggccaacttcatcgtgaccggggaggagcagggagttcccaaggagaaactcaccgggaccatacagaacgacatcctgaaggaatttatggtcaggaacacctatatatttccccccgagcccagcatgaagatcatcgccgacatatttgagtacaccgccaagcacatgcccaagttcaacagcatcagtatcagcgggtatcacatgcaggaggccggcgccgacgccatcctggagctggcgtacaccctcgccgacggcctggagtacagccggaccgggctccaggccggcctcaccatcgatgagttcgccccccgcctgtcgtttttctggggcatcgggatgaatttctacatggagatcgcgaagatgcgcgccggcaggaggctgtgggcgcacctcatcgagaaaatgttccagcccaagaactccaagagcctgctgctgcgggcacactgccagacctcgggttggtccctgaccgagcaggacccctacaacaatatcgtgaggaccgccatcgaagccatggccgccgtcttcggcggcacccagagcctgcacaccaacagcttcgacgaggccctgggccttcccaccgtgaagtccgcaaggatcgcccggaacacccaaatcatcatccaggaggaaagcggcatccccaaggtggccgacccctgggggggctcctacatgatggagtgcctgaccaacgacgtgtacgacgccgccctcaagctgatcaacgagatcgaggagatgggcggcatggccaaggccgtggccgagggcatccccaagctgcggatcgaggagtgcgccgccaggaggcaggcccggatagactccggcagcgaagtgatcgtgggcgtcaataaataccagctggagaaagaggacgccgtggaggtgctcgccatcgacaacacgagcgtgcggaacaggcagatcgagaaactcaagaagatcaaaagctcgagggaccaagccctggccgagaggtgcctggccgccctgaccgagtgcgccgccagtggggacggcaacatcctggccctggccgtcgacgccagccgcgccagatgcacggtgggcgagatcaccgacgccctgaagaaggtcttcggcgagcataaggccaacgacaggatggtgtccggggcctacaggcaagagtttggggagtccaaagagatcacctcggccatcaagcgggtgcacaagttcatggaaagggaaggcaggcggcccaggctgctcgtagccaagatgggtcaagacggccacgacaggggcgccaaagtcatcgccaccggctttgccgacctgggtttcgacgtggatatcggcccgctgttccagacccccagggaggtggcccagcaggcggtggacgccgacgtacatgccgtgggcgtgtccaccctggcggccggccacaagacgctggtgcccgagctgatcaaggagctcaacagcctgggaaggcccgacatcctggtcatgtgcggcggcgtgatcccgccccaggattacgagttcctgtttgaggtgggggtgtccaacgtctttggccccggcaccaggatccccaaggcggccgtgcaggtgctggacgatatcgagaaatgtctcgaaaagaagcagcagtccgtg

SEQ ID NO: 738 - DNA, 2250 bp, Artificial Sequence
  Codon optimized sequence that encodes an MCM polypeptide with the I671V mutation
atgcttcgagccaagaaccagctgttcctcctcagcccccactacctccggcaggtcaaggaaagcagcggctcccggctgatccagcagaggctgctccatcagcagcagcccctgcaccccgagtgggcggccctggccaagaagcagctcaagggcaaaaaccccgaggacctgatctggcatacccccgagggcataagcatcaaacccctgtacagcaagagggacaccatggacctcccggaggagctgcccggtgtgaagcccttcaccaggggcccttatccgaccatgtacaccttcaggccctggaccatcaggcaatatgccgggttcagcaccgtggaggagagcaacaagttctataaggataacatcaaggccggccagcaaggcctcagcgtagccttcgacctggccacccataggggatacgacagcgacaatccccgggtgcggggcgacgtggggatggccggcgtggcgatcgataccgtggaggacacaaaaatcctcttcgacgggatccccctggagaaaatgagcgtgtccatgaccatgaacggcgcggtgatcccggtgctggccaattttatagtcaccggggaggagcaaggcgtacccaaggagaagctgaccgggaccatccagaacgacatcctgaaggagttcatggtcaggaacacctacatcttccccccagagccgagcatgaagatcatcgccgacatatttgagtacaccgccaagcacatgcccaagttcaacagcatcagcataagcggctaccatatgcaggaggccggcgccgacgccatcctggagctggcctacaccctggccgacggcctcgagtattccaggaccgggctgcaggccggactgaccatcgacgagttcgcgccccggctgtccttcttctgggggatagggatgaacttctacatggagatcgccaagatgagggccggccggcggctgtgggcccacctgatcgaaaagatgttccagcccaagaactcaaaaagcctgttgctgcgcgcccactgccagacctccgggtggtcacttaccgaacaggacccctataataacatcgtcaggaccgccatcgaggccatggccgccgtgtttggcggcacccagtccctccacacgaactctttcgacgaggccctggggctcccgaccgtgaagagcgcgaggatcgcaaggaacacccagataatcatccaggaggaaagcggcatccccaaggttgccgacccctggggcggcagctatatgatggagtgcctgaccaacgacgtctacgatgcggccctgaagctgatcaacgaaatcgaagagatgggcggaatggccaaggccgtggccgagggtatccccaagctccggatcgaggagtgcgccgcccgccgacaggccaggatcgacagcgggtccgaggtgatcgtgggggtgaacaagtaccagctggaaaaggaggacgccgtggaggtgctggccatcgacaacacctcagtgaggaataggcagatcgaaaagctgaagaagatcaaaagctccagggaccaggccctggccgagaggtgcctggccgcactcaccgagtgcgccgcctccggcgacggaaacatcctcgccctggccgtggacgcctcccgagccaggtgcaccgtcggggagatcaccgatgccctgaagaaggtgtttggcgagcacaaggccaacgacaggatggtgtcgggcgcctacaggcaagagttcggggagagcaaggagatcactagcgccatcaagagggtgcacaagttcatggagcgggagggccggaggccccgtctgctggtggccaagatgggccaggacgggcacgaccgcggcgccaaggtgatcgccaccggcttcgccgacctggggtttgacgtggacatcggccccctgttccagacccccagggaggtagcccagcaagccgtggacgccgacgtgcacgccgtgggagtgagtaccctggccgccggccacaagaccctggtgcccgagctgattaaagagcttaacagccttggccggcccgacatcctggtgatgtgcggtggcgtcatcccgccccaggactacgagttcctgttcgaagtgggcgtgtccaacgtgttcggcccgggcacccgcatccccaaggccgccgtgcaggtgctcgacgacatcgagaaatgtctggagaagaagcagcagtccgtg

SEQ ID NO: 739 - DNA, 2250 bp, Artificial Sequence
  Codon optimized sequence that encodes an MCM polypeptide with the I671V mutation
atgctgagggccaagaaccagctgttcctcctgagcccccactacctgaggcaagtgaaggagtcctccggctccaggctgatccagcagcgactgctgcaccagcagcagcccctccaccccgagtgggccgctctcgccaagaagcagctgaagggcaagaaccccgaggacctgatatggcacaccccggagggcatctcgatcaagcccctgtattccaaacgggacactatggacctgccggaggagctgcccggcgtcaagccctttacgcggggcccctaccccaccatgtacaccttccgaccgtggaccatcaggcagtacgccggctttagcaccgtggaggagtccaacaagttctacaaggacaacatcaaggccggccagcagggcctgagcgtggcgttcgacctggccacacacaggggctacgacagcgacaaccccagggtgaggggcgacgtgggcatggccggggtggccatcgacaccgtggaggacaccaagatcctgttcgacggcatccccctggagaagatgagcgtgagcatgacaatgaatggggccgtgatccccgtgctggccaatttcatcgtcaccggggaggaacagggcgtgcctaaggaaaagctgacaggcaccatccagaacgacatcctcaaggagttcatggtgcggaacacctacatcttcccccccgagcccagcatgaagatcattgcagacatctttgagtacaccgccaagcacatgcccaagttcaacagcatctccatctcgggctaccacatgcaggaagcgggggcggacgccatcctcgagctggcctatacgctggctgatggcctggagtactccaggactggtctgcaggcgggcctgacgatcgacgagtttgcacccaggctatccttcttttggggaatcggcatgaacttttacatggagatcgccaaaatgcgggcgggccgccgcctgtgggcccacctgatcgaaaagatgtttcagcccaagaactccaagagcctgctgctgagggcccactgccagacctccgggtggagcctgactgagcaggacccatacaacaacatcgtgcggaccgcgatcgaggccatggccgccgtgttcggcggcacccagagcctgcacaccaattctttcgacgaggccctgggactccccaccgtgaagtccgccaggatcgccaggaatacccagatcatcatccaggaggagtccggcatacccaaggtggccgacccgtggggcggtagctacatgatggagtgcctgaccaacgacgtctacgacgccgccctgaagctgatcaacgagatcgaggaaatgggcggcatggccaaagcggtcgccgaagggatcccgaagctgaggatcgaagagtgcgccgccaggcggcaggccaggatcgacagtggctccgaggtgatcgtgggcgtgaacaaataccagctggagaaggaggatgccgttgaggtgctcgccatcgataacacctccgtgcggaatcggcagatcgagaagctgaaaaagatcaaaagcagccgggaccaggccctcgcggagaggtgtctggccgccctgaccgagtgcgccgcgagcggcgacgggaacatcctcgccctggccgtggacgcctcacgggcccgatgcaccgtgggcgagatcaccgacgccctcaagaaggtgttcggggagcataaggcgaacgacaggatggtgtcaggggcctacaggcaggagttcggggagtccaaggaaattacctccgccatcaagagagtccacaaattcatggaacgggagggcaggaggcccaggctgctggtggccaagatgggtcaggacggccacgacaggggcgccaaggtgatcgccaccgggttcgccgacctcgggttcgatgtcgacatcgggcccctgttccagacccccagggaagtggcccaacaggccgtggacgccgacgtgcacgccgtgggcgtgagcaccctggccgccggacacaagaccctggtgcccgagctgataaaggagctgaacagcctggggcgacccgacatcctcgtgatgtgcggtggggtgatcccgccgcaggactacgagttcctgttcgaggtgggcgtgtccaacgtgtttgggcccgggacccggatcccgaaggccgccgtgcaggtgctggatgatatagagaagtgcctggagaagaagcagcagagcgtg

SEQ ID NO: 740 - DNA, 2250 bp, Artificial Sequence
  Codon optimized sequence that encodes an MCM polypeptide with the I671V mutation
atgctgcgcgccaagaaccagctgttcctgctgtccccgcattacctgaggcaggtgaaggagtccagcgggtcccgtctgatccagcagaggctgctgcaccagcagcagcccctgcaccccgagtgggccgctctggctaagaagcagctgaagggtaaaaaccccgaggacctgatctggcacacccccgaaggcatctccatcaagcccctctacagcaagagggatactatggacctgcccgaggagctgcccggcgtcaagccctttaccaggggcccctatccgaccatgtacacgtttcgcccctggaccatcaggcagtacgctggcttcagcaccgtggaggaaagcaataagttttacaaggacaacatcaaggccgggcagcagggtctgagcgtggccttcgacctcgccacccaccgcggctacgactccgacaacccccgggtgcggggcgacgtgggcatggccggggtggccatcgacaccgtggaggacaccaagatactcttcgatgggatccccctggagaagatgtcagtctcgatgaccatgaacggcgccgtgattcccgtgctggccaactttatcgtgaccggggaagagcagggggtgcccaaagaaaaactgaccgggaccattcagaacgatatcctcaaggagtttatggtgcgcaatacctacatcttcccccccgaacccagcatgaagatcatcgcggacatctttgagtataccgccaagcacatgccgaagttcaatagcataagcatttccggttatcacatgcaggaagccggcgccgatgcgatcctggagctggcctacaccctggccgatggcctcgagtactcccgaacggggctgcaggccgggctcacgatcgatgagttcgcccccaggctgtccttcttctggggaatcggcatgaacttttacatggagatcgccaagatgagggccggcaggcgactgtgggcgcacctgattgaaaaaatgtttcagcccaagaactcgaagagcctcctactgcgggcccactgccaaaccagcggctggagcctgaccgagcaagacccctacaacaatatcgtgaggaccgccatagaggcgatggccgccgtgttcggagggacccagagcctgcacaccaactccttcgacgaggccctgggcctgcccaccgtgaagagcgccaggatcgcccgcaacacccagatcatcatccaggaggaaagcggcatccccaaggtggccgacccctggggtggctcctacatgatggagtgcctgaccaacgacgtctacgacgccgcgctgaagctcataaacgagatagaggagatgggcgggatggccaaggccgtggccgagggcatccccaaactgaggatcgaggagtgcgccgccaggaggcaggcccgcatcgactccgggagcgaggtaatcgtgggcgtgaacaagtaccaactggagaaggaggacgccgtcgaggtgctggccatcgacaacacctccgtgcgaaacaggcagatcgagaagctgaaaaagatcaagagctcaagagaccaggcactggctgagaggtgcctggccgccctcaccgagtgcgcagccagcggcgacggcaacatactggccctggccgtggacgcaagcagggcccgttgcaccgtgggcgagatcaccgacgccctgaagaaagtgttcggcgagcacaaggcgaacgaccggatggtgagcggcgcgtacaggcaggagttcggcgaatccaaggagatcacctccgccatcaagcgagtgcacaagtttatggagcgggagggccgccgccccaggctgctggtcgcgaagatgggacaggacggacacgacaggggcgccaaagtgatcgccaccggcttcgccgaccttggattcgacgtggacataggccccctgttccagaccccccgagaggtggcgcagcaagccgtagatgccgatgtgcatgccgtgggtgtgtccaccctggcggccggccacaaaaccctggtgcccgagctgatcaaggagctgaactccctgggccggcccgacatcctcgtgatgtgcgggggcgttatccccccgcaggactatgagttcctgttcgaagtcggggtgtccaacgtgttcggccccggcacgaggatccccaaggccgccgtgcaagtcctggacgacatcgaaaagtgcctggagaagaagcagcaaagcgtg

SEQ ID NO: 741 - DNA, 2250 bp, Artificial Sequence
  Codon optimized sequence that encodes an MCM polypeptide with the I671V mutation
atgctgcgggccaagaatcagctgttcctgctgagcccccactacctgaggcaggtgaaagagtcctccggctccaggctgatccagcagcgactgctgcatcagcaacagccgctgcaccccgagtgggccgccctggccaagaagcagctgaagggcaagaatcccgaggacctgatctggcacaccccggaaggcatcagcatcaagcccctgtacagcaaacgcgatacgatggacctgccggaggagctgccgggcgtgaagccgttcacccgcgggccctaccccaccatgtacacctttcgcccctggaccatccggcagtacgccggcttcagcacggtcgaggagagcaacaagttctacaaagacaacatcaaggccggccagcagggcctctccgtcgccttcgacctggccacccacaggggttacgacagcgataatccacgggtgaggggcgacgtggggatggctggggtggccatcgacaccgtggaggataccaagatcctgttcgacggcatccccctggagaagatgagcgtgagcatgaccatgaacggcgccgtcatccccgtgctggccaacttcatcgtgaccggcgaggagcaaggggtgcccaaagagaagctcaccggaaccatccagaacgacatcctgaaggagttcatggtccggaacacctacatatttccccccgagcccagcatgaagatcatcgccgatatcttcgagtacaccgccaagcacatgcccaagttcaacagcatctccatctccggctaccacatgcaggaggcaggggccgatgccatcctggagctggcctataccctggccgacggcctggagtacagccggaccggcctccaggccggtctgaccatcgatgagttcgcccccaggctgtcgtttttttggggcatcggcatgaacttctacatggaaatcgccaagatgagggccggccggaggctgtgggcccacctgatcgagaagatgttccagcccaaaaacagcaagtccctgctcctgcgtgcccactgccagaccagcgggtggagcctgacggagcaggacccctacaacaacatcgtgaggacggccatcgaggccatggccgccgtttttggcggcacccagagcctgcacacaaacagcttcgacgaggccctgggactgcccaccgtgaagtcggcccggatcgcccgaaacacccagatcatcatacaggaggaaagcggcatccccaaggtggccgacccctgggggggaagctacatgatggagtgcctgaccaacgacgtgtacgacgctgccctgaaactgatcaatgagatcgaggagatgggcggcatggccaaggccgtggccgaagggatcccgaagctgcggatcgaggaatgcgcggcccggaggcaggccaggatcgacagcggcagcgaagtgatcgtgggggtcaataaatatcagctggaaaaggaggatgcggtcgaagtcctggccatcgacaacaccagcgtgcggaaccgccagatagagaagctgaaaaagatcaagtccagccgggaccaggccctggccgaaaggtgtctcgccgccctcaccgagtgcgcggcaagcggggacggcaacatcctggccctggccgtggacgccagccgagccaggtgcaccgtgggtgaaataaccgacgccctgaagaaggttttcggcgagcacaaggccaacgaccgtatggtgagcggcgcctatcggcaggaattcggcgagtccaaggagatcacctccgccatcaagagggtgcacaagttcatggagcgcgagggacggcgaccgcggctgctggtggccaagatgggccaagacgggcacgacaggggcgccaaggtgatcgccaccggattcgcggacctggggttcgacgtggacatcgggcccctgttccagaccccacgggaggtggcccaacaggccgttgatgcggacgtgcacgcggtgggcgtctccaccctggccgccggccacaagaccctcgtgccagagctgatcaaggagctgaacagcctgggcagaccagatatcctggtcatgtgcgggggggtgatcccgccccaggactacgagttcctgttcgaggtgggcgtgagcaatgttttcggccctgggaccagaatccccaaggccgccgtgcaggtgctggacgacatcgaaaagtgcctcgagaagaagcagcagagcgtg

SEQ ID NO: 742 - DNA, 2250 bp, Artificial Sequence
  Codon optimized sequence that encodes an MCM polypeptide with the I671V mutation
atgctgagggccaagaaccagttgtttctgctctccccccactacctgaggcaggtgaaagaaagctccggcagcaggctgatccagcagaggctcctgcaccagcagcaaccgctccatcccgagtgggcagccctggcgaagaaacagctgaaagggaagaaccccgaggatctgatctggcacacccccgaggggatcagcatcaagccgctgtacagcaaacgggacaccatggatctgcccgaagagctgccgggcgtgaagcccttcaccagggggccctaccccaccatgtataccttcaggccctggaccatacggcagtacgccggcttctccactgtggaagagtcgaataagttctacaaggataacatcaaggccggccaacagggcctgagcgtggcctttgacctggccacccatcgcgggtatgacagtgataaccctcgggtgcgtggcgacgtgggtatggccggcgtggccattgacaccgtggaggacacgaagatcctcttcgacggcatccccctggagaagatgagcgtgagcatgaccatgaacggcgccgtgattcccgtgctcgccaatttcatcgtcaccggcgaggagcagggcgtgcctaaggagaagctgaccgggaccatccagaatgacatcctgaaggagtttatggtgaggaacacctacatcttcccgcccgaacccagcatgaagatcatcgccgacatcttcgagtacacagccaagcacatgcccaagttcaactccatcagcatctccggataccatatgcaggaagccggggccgatgcgatccttgagctggcctataccctggccgacggcctggagtactccaggaccggcctgcaagccgggctgacaatcgatgagttcgccccccgactgagcttcttctggggcatcggcatgaacttttacatggagatcgccaaaatgcgggctgggaggaggctctgggcccacttgatcgagaagatgtttcagcccaagaactccaagagcctgctcctgagggcccactgccagacgagcggttggtccctcaccgagcaggacccctacaacaacatcgtgaggaccgccatcgaggccatggccgccgtgttcggcgggacgcagagcctccacaccaactcctttgacgaggccctggggctgcccacggtcaagagcgcacgcatagccaggaacacccaaatcatcatccaggaggagagcggaatccccaaggtcgcggacccatgggggggaagctacatgatggagtgcctgaccaacgacgtatacgacgccgccctgaaactgatcaatgagatagaagagatggggggaatggccaaagccgtggccgagggcatcccgaagctgaggatcgaagaatgtgccgccaggaggcaggcccggatcgacagcggcagcgaggtcatcgtcggggtgaataaataccaactggagaaggaggacgccgtggaggtcctggccatcgacaatacaagcgtgcgcaatcggcagattgagaagctgaagaagatcaagagcagcagggaccaggcgctggcagagcggtgtctggccgccctgaccgaatgcgccgccagcggggacggaaacatcctggccctggccgtggatgcctcccgggccaggtgcaccgtcggcgagatcaccgacgctctgaagaaggtcttcggcgagcacaaggctaacgaccggatggtgagcggcgcctaccggcaggagttcggcgagagcaaggagatcacctccgccatcaagcgggtgcacaagtttatggaacgcgagggccgcagacccaggctcctcgtggccaagatgggccaggatggccacgacaggggggccaaggtcatcgccaccggattcgccgatctgggcttcgacgtggacatcgggcccctgtttcaaacgccccgcgaagtagcacagcaggccgtggacgccgacgtgcacgccgtgggcgtgtccaccctggccgccggccataagaccctggtgcccgagctgatcaaggagctgaacagcctggggcgcccggatatactcgtgatgtgcgggggcgtcatccccccccaggattacgagtttctcttcgaggtgggggtgagcaacgtctttggccccggaacccgaatccccaaggccgccgtgcaggtgctcgacgatatagagaagtgcctggagaaaaagcagcagtccgtg

SEQ ID NO: 743 - DNA, 2250 bp, Artificial Sequence
  Codon optimized sequence that encodes an MCM polypeptide with the I671V mutation
atgctgagggccaagaaccagctcttcctgctgtccccccactacctgcggcaggtgaaggagagctccggcagccgcctgatccaacagcggctgctgcaccagcagcaaccgctgcaccccgagtgggccgccctggccaagaaacagctcaaggggaagaaccccgaggacctgatctggcacacccccgagggcatttccatcaaacccctgtacagcaagagggacaccatggacctgcccgaggaactgccgggagtgaagcccttcacccgcggcccctatcccaccatgtacaccttcaggccgtggaccatccgccagtatgccggctttagcaccgtggaggagagcaacaagttctacaaagacaacatcaaggcagggcagcagggcctgagcgtggccttcgatctggccacccataggggctacgacagcgacaacccgagggtgaggggggacgtgggcatggccggcgtggccatcgataccgtggaggataccaagatcctgtttgacggcatccccctggagaagatgtccgtgagtatgaccatgaacggcgcggtgatcccggtgctggccaacttcatcgtgaccggcgaggaacagggcgtgccaaaggagaagctgaccggcaccatccagaacgacatactcaaagagttcatggtacggaacacctacatcttcccccccgagccctcgatgaagatcatcgccgacatcttcgagtacaccgccaagcacatgcccaagttcaactccatctccatctcgggctatcacatgcaggaagccggggccgacgccatcctggaactggcctacactctggccgacggcctcgagtactccaggaccggcctgcaagcgggcctgaccatcgacgagttcgccccccggctgtcttttttttggggaatcggcatgaacttctacatggagatcgccaagatgagggccggtcgccggctctgggcccacctgatcgagaagatgttccagcccaagaacagcaagagcctcctgctgagggcccactgccagaccagcggctggagcctgactgagcaagatccctacaacaacatcgtgcggacggccatcgaggcgatggctgccgtcttcggcggaacccagagcctgcataccaacagcttcgatgaagccctggggctgcccaccgtgaagtccgcgaggatcgccaggaacacgcagatcattatacaggaggagagcgggatccccaaggtggcagatccctggggcggaagctacatgatggagtgcctgaccaacgacgtgtacgacgcggcgctgaagctgattaacgagatcgaggaaatgggaggcatggccaaggccgtggccgagggcattcccaaactccggatcgaggagtgtgcagccaggcgacaagccaggatcgacagtggctccgaggttatcgtcggcgtgaacaagtaccagctggagaaagaggacgccgtggaggtcctggccatcgacaacacaagcgtgaggaaccggcaaatcgaaaagctgaagaagatcaaaagcagccgggaccaggccctcgccgagcgctgtctggccgccctcaccgagtgtgctgccagcggtgacggcaatatcctggccctggccgtggatgccagccgcgcccggtgcaccgtcggcgaaatcaccgatgccctgaagaaagtgttcggggagcacaaggccaacgaccgcatggtgtccggcgcctatcggcaggagttcggcgagagcaaggaaataaccagcgccatcaagcgggtgcacaaattcatggagcgggagggccggcggcccaggctgctggtcgccaagatgggccaggacgggcacgacaggggagctaaggtgatcgcgacggggttcgccgatctgggctttgacgtggatatcggacccctcttccagacaccgcgggaggtggcccagcaggccgtggacgccgacgtgcatgccgtcggcgtgagcacactggccgccggacacaagactctggtgcccgagctcatcaaggagctgaacagcctcggacggcccgatatcctcgtgatgtgcggtggcgtgatccccccgcaggactacgaatttctctttgaggtgggcgtgagcaacgtgttcggccccggcacgaggatccccaaagccgccgtgcaggtgctggacgacatcgagaagtgtttggagaagaagcagcagtccgtg

SEQ ID NO: 744 - DNA, 2250 bp, Artificial Sequence
  Codon optimized sequence that encodes an MCM polypeptide with the I671V mutation
atgctgagggccaagaaccagctgtttctcctgagcccccactacctcaggcaggtgaaggagagctccggctcaaggctgatccagcaacgtctgctgcatcagcagcaacccctgcacccagagtgggccgccctcgccaagaagcagctgaagggcaaaaaccccgaggatctgatctggcacacccccgagggcatcagcatcaagcccctgtactccaagagggatacaatggacctgccggaggagctgcccggagtgaaacccttcaccagaggcccctaccccaccatgtacacctttaggccctggaccatacggcagtacgccgggttcagcaccgtggaggagagcaataaattctacaaggacaacataaaggccggacagcagggcctgtccgtggccttcgacctggccacccacaggggctatgacagcgataacccccgcgtgaggggggacgtcggcatggccggagtagccatcgataccgtggaggataccaagatcctgttcgacggcatccccctcgagaagatgagcgtgtccatgaccatgaatggcgcagtgatccccgtgctggccaacttcatcgtgaccggtgaggagcagggcgtgcccaaggagaaactgaccgggaccatccagaacgacatactgaaggagtttatggtgcggaacacgtacatattcccccccgagcccagcatgaagatcatcgccgacatcttcgaatataccgccaagcacatgcccaagttcaacagcattagcatctcaggctaccacatgcaggaggccggcgccgacgcgatcctggagctggcctacaccctggccgacggcctggagtacagccggaccggcctgcaggcaggcctgaccatcgacgaattcgccccccggctctccttcttctgggggatcggcatgaacttttacatggagatcgccaaaatgcgggccggccggcggctctgggcccacctgatcgaaaagatgttccagcccaagaacagcaagagcctgctgctgagggcccactgccagacgagcggctggagcctgaccgagcaagacccctacaacaacatcgtgcgcaccgccatagaggccatggccgccgtgttcgggggtacacaaagcctccacactaacagcttcgacgaggccctgggtcttcccacggtgaagtcagcgcgcattgcccgcaacacccagatcatcatccaagaagagtccggcatccccaaggtggccgacccctggggcgggagctacatgatggaatgcctcaccaacgacgtgtatgacgcggcgctcaagctgatcaacgagatcgaagaaatgggcggcatggcaaaggccgtggccgagggcatccctaagctgagaatcgaggagtgcgcagccagacggcaggccaggattgacagcggcagcgaggtaatcgtgggagtgaacaagtatcagctggagaaggaggacgccgtggaagtgctggccatcgacaacacctccgtgaggaatcgacagatcgagaagctgaagaagatcaagtccagccgggaccaggccctggccgagaggtgcctggccgccctgaccgagtgtgccgccagcggggacggcaacatccttgccctggccgtggacgcgtccagggcccgctgtaccgtgggcgagatcaccgacgccctgaagaaggtgtttggggagcacaaggccaatgatcgcatggtgtccggcgcgtaccggcaggagttcggagagagcaaggagatcacctccgccattaagagggtgcacaagttcatggaaagggagggccggaggccccgcctactggtggccaaaatgggccaagacggccacgacaggggagccaaggtgatcgccaccgggttcgcggacctgggctttgacgtcgacatcggccccctgtttcagacccccagggaagtggcgcagcaggcggtggacgccgatgtgcacgccgtgggcgtgagcacactggcagccggccacaagactctggtgcccgagctgataaaagagctgaactctctgggcaggcccgacatcctggtgatgtgcggcggcgtcatccccccccaagactacgagttcctgttcgaggtgggcgtaagcaatgtgttcggccccggcacccgaattcccaaggcggccgtgcaagtgctggacgacatcgagaagtgcctcgagaagaagcagcagagcgtc

SEQ ID NO: 745 - DNA, 2250 bp, Artificial Sequence
  Codon optimized sequence that encodes an MCM polypeptide with the I671V mutation
atgctcagggccaagaatcagctgttcctgctcagcccccattacctgaggcaggtgaaggaatcgtccgggtcccgcctcatccagcagcgactcctgcaccagcagcagccactacaccccgagtgggccgccctggccaagaagcagctgaaaggcaagaaccccgaggatctcatctggcacacgcccgagggcatcagcatcaaacccctgtattccaagcgtgacaccatggacctgcccgaggagctgcctggtgtcaagcccttcacccgggggccctacccgacgatgtacacctttcgtccctggaccatcaggcagtacgccggcttcagcaccgtagaggagagcaacaagttctacaaagacaacatcaaagccggtcagcaagggctgtccgtggccttcgacctggccacgcaccgcggctatgacagcgacaacccccgagtcagaggggacgtggggatggccggggtggcaatcgataccgtcgaggacaccaagattctgttcgatggcattcccctggagaagatgagcgtcagcatgaccatgaatggagccgtgatccccgtgctggccaacttcatcgtgactggtgaggaacagggcgtgcccaaggagaagctgaccgggaccatccagaacgacatcctgaaggagtttatggttcgcaatacctacatattcccccccgagcccagcatgaagatcatcgccgatatcttcgaatataccgccaaacacatgcccaagtttaatagcatcagcatcagcggctaccacatgcaggaagccggggccgacgccatcctggagctggcatacactctggccgacggcctggagtacagccgcaccggcctccaagcagggctcacgatcgacgagttcgccccacggctcagcttcttctgggggatcggcatgaatttctacatggagatcgccaagatgagggccggtcggaggctttgggcccatttgatcgaaaaaatgttccaacccaagaatagcaaatccctgctgctcagggcccactgccagaccagcggctggtcactgaccgaacaggacccatacaacaatatcgtgaggaccgccatcgaggccatggcggcggtgttcggcggcacccagagcctccacaccaacagttttgacgaggccctgggactgccgaccgtgaagagcgcccggatcgcgcgcaacacgcagattatcattcaggaggagtccggcatccccaaggtcgccgacccctggggcggcagctacatgatggaatgcctgaccaacgacgtgtacgacgccgccctcaagctcatcaatgagatcgaggagatgggcgggatggccaaggccgtggccgagggcatccccaagctgcgaatcgaagaatgcgccgccaggcggcaggcccggatcgactccggctccgaggtcatcgtcggcgtcaacaagtaccagctcgagaaggaggatgccgtggaggtgctggccatcgataacacgtccgtgaggaaccggcagattgagaagctgaagaagatcaagagctcccgagaccaggccctggccgagaggtgcctggccgccctgactgagtgcgccgcctccggggacgggaacatcctggccttggctgtggacgcgagcagggccaggtgcaccgtgggcgaaatcaccgacgccctcaagaaggtcttcggcgagcacaaggccaatgaccggatggtcagcggtgcctacaggcaggagttcggtgaatccaaggagatcacctcggccataaaaagagtccacaagtttatggagagggaagggcgtaggccccgactcctggtggccaagatgggccaagacggccacgaccggggcgccaaggtcatcgccaccgggttcgccgacctggggttcgacgtcgacatcgggcccctgttccagaccccacgagaggtggcccagcaggccgtcgacgccgacgtgcacgccgtgggcgtctccacgctggcggccggccacaaaaccctcgtgcccgagctgatcaaggagctgaattccctcggccggcccgacatcctggtgatgtgcgggggggtcatccccccccaagattacgagttcctgttcgaggtgggcgtgagcaacgtgttcggccccggcaccaggatccccaaggccgccgtgcaggtgctggacgacatcgagaagtgcctcgagaagaagcagcagtccgtg

SEQ ID NO: 746 - DNA, 2250 bp, Artificial Sequence
  Codon optimized sequence that encodes an MCM polypeptide with the I671V mutation
atgctgagggccaagaaccagctattcctgctgagcccacactacctccggcaggtgaaggagagcagcggaagcaggctgatccagcagcggctgctccaccagcagcaaccactgcaccccgagtgggccgccctcgccaagaaacaactgaagggcaagaaccccgaagacctaatctggcacactccagagggtatcagcatcaagcccctgtactccaagagagacaccatggacctgcccgaggaactgcccggcgtcaagccctttaccaggggcccctaccccaccatgtataccttccgaccctggaccatcaggcagtacgccgggttcagcacggtggaggagtccaataagttctacaaggataacatcaaggccggtcagcagggtctgtccgtggccttcgacctggccacccaccgcggatatgacagcgacaacccgagggtgaggggcgacgtggggatggccggcgtggccatcgacaccgtggaggacacaaagatactgttcgacggaatcccgctggaaaagatgagcgtcagcatgaccatgaacggggccgtgatccccgtgctggccaacttcatcgttaccggtgaggaacagggggtgcctaaggagaagctgaccggcaccatacagaacgacatcctgaaggagtttatggtgaggaacacctatatcttcccccccgagccaagcatgaaaatcatcgcagacatctttgagtacaccgccaagcacatgcccaagttcaacagcatcagcatttccggctaccacatgcaggaagccggggccgacgccatcctcgaactggcctacaccctggctgacggcctggagtacagccggacagggctgcaggccgggcttacgatcgacgagttcgccccccggctgtccttcttttgggggatcgggatgaacttctatatggagatcgcaaagatgagggccggcaggaggctgtgggcgcacctcatcgagaagatgttccagccgaaaaactcgaagagcctgctgctgcgcgcccattgccaaacaagcggctggtcactgacagagcaggacccctacaacaatatcgtgaggaccgccatcgaggccatggccgccgtgttcgggggcacccagagcctgcatactaactccttcgacgaggccctgggtctccccacggtgaagagcgccaggatcgccaggaacacccagatcattatccaggaggagagcggcattcccaaggtggccgacccctgggggggctcctacatgatggagtgcctgacaaacgatgtgtacgacgccgccctcaagctgatcaacgagatcgaggagatggggggcatggccaaggccgtggccgagggcatccccaagctgcggatagaggagtgcgccgccaggcgccaggccaggatcgacagcggttccgaggtgatcgtgggcgtgaacaagtatcagctggagaaggaagacgccgtggaggtcctggccatcgacaacacatcggtgagaaataggcagatcgaaaagctcaaaaagatcaagtccagccgtgaccaagccctggccgagaggtgtctggcggccctgaccgagtgcgccgccagcggcgacggcaacatccttgccctcgcggtcgatgccagcagggccaggtgcaccgtgggggaaatcaccgacgccctgaagaaggtgttcggcgagcacaaagccaacgacaggatggtgagcggcgcctaccgccaagagttcggcgagtccaaggagatcaccagcgccatcaagcgcgtgcacaagttcatggagagggaaggcaggaggccgcgcctgctggtggccaagatgggccaggacggccacgataggggggccaaagtcatcgccaccggcttcgccgacctgggcttcgacgtggacatcggccccctgtttcagaccccccgtgaggtcgcccagcaggccgtggacgcggatgtgcacgccgtgggggtgtccaccctggccgccggacataaaaccctggtgccggaactgatcaaggaactgaacagcctgggacggcccgacatactggtgatgtgcggaggcgtgatccccccccaggattacgagttcctgttcgaggtgggcgtttccaatgtgttcggaccgggcacgcggattcccaaggccgcagtgcaggtgctggatgacatcgaaaaatgcctggagaagaagcagcagtcagta

SEQ ID NO: 747 - DNA, 2250 bp, Artificial Sequence
  Codon optimized sequence that encodes an MCM polypeptide with the I671V mutation
atgctgcgcgccaagaaccagctgttcctgctgtccccccactacctgcggcaggtgaaggagagctccggcagccgtctgatccaacagcggttactgcaccagcaacagcctctgcacccagagtgggccgccctggccaagaagcagctcaaagggaagaaccccgaggacctgatctggcacacccccgaaggcatcagcatcaagcctctctatagcaagcgagacaccatggaccttcccgaggagctgcccggcgtcaagcccttcacccgaggcccctaccccaccatgtataccttccgcccctggacaatcaggcaatacgccggcttcagcaccgtggaggagagcaacaagttctacaaggacaacatcaaggccggccagcaaggcctcagcgtggccttcgacctggcgacccacaggggctatgacagcgataaccccagggtcaggggggacgtgggcatggccggggtggccatcgacaccgtggaagacaccaagatcctgttcgacgggatccccctcgagaaaatgtcggtgtccatgaccatgaatggagccgtgatccccgtactggccaacttcatagtcaccggagaggagcaaggcgtcccaaaggagaagctgaccggcaccatccagaacgacatcctgaaagagtttatggttagaaacacctatatcttcccccccgagccctccatgaagatcatcgcggatatcttcgaatacaccgccaagcacatgcccaagttcaacagcataagcattagcggctaccatatgcaagaggccggcgccgatgccatcctggagctggcttacaccctcgccgatggcctggaatacagccgaaccggactgcaggccgggctcaccattgacgaatttgcaccccgtctaagcttcttctggggcatcggcatgaacttttacatggagatcgccaagatgcgcgccgggcgaaggctgtgggcccacctgatcgagaagatgttccagccgaagaacagcaagagcctcctgctgagggcccactgccagacctccggttggagcctgaccgagcaggacccctacaataacatcgtgcgcacggccatcgaggccatggccgccgtgttcggggggacccaaagcctgcacaccaactcgttcgacgaagcgctgggcctcccgacggtgaagtccgcccgcatcgcccggaacacccagatcatcatccaagaggagagcggcattcccaaggtggcagacccctggggcggtagctacatgatggagtgcctgaccaatgacgtctacgatgccgccctgaagctcatcaacgagatcgaggagatgggcggtatggccaaggccgtggccgaaggcatccccaagctgcgcattgaggaatgcgccgcccggaggcaagcccggatagacagcggctccgaagtgatcgtgggcgtcaacaaataccagctggagaaggaggacgccgtcgaggtgctggccattgacaacaccagcgtgaggaacaggcagatcgaaaagctgaaaaaaattaagagctcgagggatcaagccttggccgagaggtgtctggccgccctgaccgagtgcgccgccagcggcgatggcaacatcctggccctggccgtggacgccagccgcgcccggtgtaccgtgggcgagattaccgacgccctgaagaaggtctttggggagcacaaggccaacgaccgaatggtgagcggcgcctataggcaggagtttggcgaaagcaaggagatcaccagcgccatcaagcgtgtgcataagttcatggagcgggagggccggcgcccgaggctgctcgtcgccaagatgggccaggatggccatgacaggggcgccaaggtcatcgccaccgggtttgccgacctgggcttcgacgtggacatcgggcccctcttccagacgccgcgcgaagtcgcccagcaggccgtagatgccgacgtgcacgcagtgggcgtgtccaccctcgcagcggggcacaagacactggtgcccgagctgattaaggagctcaactccctgggccgacccgacatcctggtgatgtgcgggggcgtcatccccccccaggactatgagttcctgttcgaggtgggcgtctccaacgtgttcggccccggcactaggatccccaaggccgcagtacaggtgctcgacgacatagagaagtgcctggagaagaaacagcagagcgtg

SEQ ID NO: 748 - DNA, 2250 bp, Artificial Sequence
  Codon optimized sequence that encodes an MCM polypeptide with the I671V mutation
atgctgagggctaagaaccagctgttcctgctgagcccccactacctgaggcaagtgaaggagtcctcgggcagcaggctgatacagcagaggctgctgcaccaacaacagcccctgcaccccgagtgggccgccctggccaagaagcagctgaaggggaagaatccggaggacctgatctggcacaccccagagggcataagcatcaaacccctgtacagcaagcgggataccatggacctgcccgaggagctgcccggcgtgaagcccttcacgaggggcccctaccccaccatgtatacctttaggccctggaccatcaggcagtatgccggcttcagcaccgtggaggagagcaacaaattctacaaggataacataaaggccgggcagcaaggtctcagcgtcgccttcgatctcgccacccatcggggctacgactcggataacccccgcgtgcgcggcgacgtaggaatggccggcgtcgccatcgacaccgtggaggacacgaagatactattcgacggaatccccctggaaaagatgagcgttagcatgaccatgaacggggccgtgatccccgtgctggccaatttcatcgtgaccggcgaagagcagggcgtgccgaaggagaagctcaccggtaccatccagaacgacatcctgaaagagttcatggtgaggaatacctacatctttccccccgaacccagcatgaagatcattgcggacatcttcgagtataccgctaagcacatgccgaagtttaacagcatctccatcagcggctaccatatgcaagaggccggcgccgacgccatcctggagctggcgtacaccctcgccgacggcctcgagtatagccgtaccggcctgcaggcggggctcaccatcgacgagttcgccccccgactgagtttcttctggggcatcggcatgaacttctacatggagatcgcaaagatgagggccggccgaaggctctgggcccacctgatcgagaagatgtttcagcccaagaacagcaagagcctgctgctgagggcccactgccagacctccgggtggtccctgaccgagcaggacccctacaataatattgttagaaccgccatcgaggccatggccgcagtcttcggaggcacccagagcctgcacaccaactccttcgacgaggccctgggcctgccgaccgtgaagagcgccaggatcgccaggaacacccaaatcataatccaggaggagagcggcatccccaaggtcgccgacccctggggcggatcctacatgatggaatgcctgaccaacgacgtgtacgacgccgccctgaaactgatcaatgagatcgaggagatgggcgggatggcgaaggccgtggccgaggggatccccaagctgcggatcgaggagtgcgccgccaggaggcaggcccgcatcgacagcggcagcgaagtgatcgtgggcgtcaacaagtaccagctggagaaagaagacgccgtggaggtgctcgcaatcgacaacaccagcgtaaggaatcgccagatcgaaaagctgaaaaagatcaaaagcagccgagaccaggccctggccgagaggtgtctggccgccctgaccgagtgtgccgccagcggcgacgggaacattctggccctggccgtggatgcaagcagggctaggtgcaccgtgggcgagataaccgacgcgctgaagaaggtgttcggcgagcacaaggccaacgaccgcatggtgtcgggggcctatcggcaggagtttggggagagcaaggagattacctccgcgattaagagggtccacaagttcatggagcgcgaaggcaggcggccccggctgctggtggccaagatgggccaggacgggcacgatcgtggagccaaagtgatcgccaccggcttcgccgacctgggcttcgacgtggacatcggccccctcttccagacccccagggaggtggcccagcaggccgtggacgccgacgtccacgccgttggcgtgtccacactggccgccggacacaaaaccctggtgcccgagcttatcaaagagctgaacagcctgggcaggcccgacatactcgtgatgtgcgggggcgtgatccccccccaggactacgagttcctgttcgaagtgggcgtgagcaacgtctttggccccggcaccaggatccccaaggccgccgtgcaggtgctcgacgatatcgagaaatgccttgagaagaagcagcagagcgtg

SEQ ID NO: 749 - DNA, 2250 bp, Artificial Sequence
  Codon optimized sequence that encodes an MCM polypeptide with the I671V mutation
atgctgagggccaagaaccagctgttcctgctgagcccccactacctgaggcaggtgaaagaaagcagcggcagcaggctaatccaacagcgtctgctccaccagcagcagcccctccatccagagtgggcggccctggcgaaaaagcaactcaagggcaagaatcccgaagatctcatctggcatacgcccgaggggatcagcataaagccgctgtacagcaagagggacaccatggatctgcccgaggaactgcccggcgtgaagccctttacgcggggcccctacccgaccatgtacaccttccggccctggaccatccgacagtacgccgggttcagcaccgtggaggagagcaataagttttacaaggacaatatcaaagccggccagcagggcctgtccgtcgccttcgacctggccacccaccgcggatatgacagcgacaacccccgggtgcggggcgacgtgggcatggccggcgtggccatcgacaccgtggaggacacaaagatcctgttcgacgggatacccctggagaagatgagcgtcagcatgaccatgaacggcgccgtgatcccagtcctggccaacttcatcgtgaccggcgaggaacagggggtgcccaaggagaagctgaccggcaccatccagaatgatatcctgaaggagttcatggtgcggaacacctacatcttcccccccgaaccgagcatgaagatcatcgccgacatctttgagtacaccgccaagcatatgcccaagtttaatagcatcagcatcagcgggtaccacatgcaggaggccggagccgacgccatcctcgagctcgcctacactctcgccgacggcctcgagtacagccggaccggactgcaggccggcctcaccatcgacgagttcgcaccccggctgtccttcttctgggggatcggcatgaatttctacatggagatcgccaagatgcgggccggcaggcgcctgtgggcccacctcatcgagaagatgttccagcctaaaaacagcaagagcctgctgctgagggcgcactgccagacctccggctggagcctgaccgaacaggacccctataataatattgtccggaccgccatcgaagccatggcagccgtgttcggcggtacccagtccctgcacaccaactccttcgacgaggcgctgggcctgcccaccgtcaagtccgccaggattgcccgtaacacccagatcatcatacaggaggagtcaggcatcccgaaggtggccgacccctggggcggctcctacatgatggagtgcctcaccaacgacgtgtacgacgccgccctgaagctgatcaacgagatcgaggagatgggcggcatggcaaaggccgttgccgagggcatccccaagctgaggatcgaagagtgcgccgccaggaggcaggcccggatagactccggcagcgaggtgatcgtcggcgtgaacaagtaccagctggagaaggaagatgccgtggaagtgctggccatcgacaatacctccgtgcgcaaccgtcagatcgagaagctcaagaaaatcaagtccagccgggaccaggccctggcggaacgatgtctggccgccctgaccgagtgcgccgccagcggcgatggcaatatactggccctggccgtggacgccagccgcgcccggtgcaccgtcggggagatcaccgacgccctgaagaaggtgttcggggaacacaaggccaacgaccggatggtgagcggcgcctacaggcaggagttcggggagagcaaggagatcaccagcgccatcaagagggtccacaagttcatggagagggagggcaggcggccgcggctgttggtggccaaaatggggcaggacgggcacgaccggggcgccaaggtcatcgccaccggcttcgccgatctgggttttgacgtggacatcggccccctgttccaaacccccagggaggtggcccagcaggccgtcgacgccgacgtgcatgccgtcggcgtgtccaccctggccgccgggcacaagacactggtccccgagctcatcaaggagctcaattccctgggcaggcccgacatcttggtcatgtgcggcggcgtgatccccccgcaggactatgagttcctcttcgaggttggggtgagcaacgtctttggccctgggacaaggatccccaaggccgccgtgcaggtgctggacgacatcgagaaatgtctcgagaagaagcaacagagcgtt

SEQ ID NO: 750 - DNA, 2250 bp, Artificial Sequence
  Codon optimized sequence that encodes an MCM polypeptide with the I671V mutation
atgctcagggccaagaaccagctcttcctgctctccccccactacctgaggcaggtgaaggaatcctccgggagcaggctgatacagcagaggctgctgcaccaacaacagcccctccaccccgagtgggccgccctggccaagaagcagctgaaagggaagaaccccgaagacctcatctggcacacccccgaagggatcagcatcaagccgctgtacagcaagcgggacacgatggacctgcccgaggagctgcccggggtcaaaccattcaccagggggccctaccccaccatgtataccttccgcccctggacgatcaggcagtacgccggcttttccacggtggaggagagcaacaagttctacaaggataacatcaaggccggacagcagggcctgagcgtcgccttcgacctggccacccataggggctacgacagcgacaaccccagggtacgtggcgacgtaggaatggccggggtcgccatcgacaccgtggaagacaccaagatcctgttcgacgggatccccctcgagaaaatgagcgtcagcatgaccatgaacggggccgtcatccccgtgctggccaacttcatcgtgacgggcgaggagcaaggagtacccaaagaaaagctgaccggcaccatccagaacgacatcctgaaggagttcatggtccggaacacctacatcttccccccggaaccaagcatgaagatcatcgccgatatcttcgagtacaccgccaaacacatgcccaagttcaattccatcagcatcagcggctaccacatgcaggaggccggcgcggacgccatcctggagctcgcctacaccctggcggacggcctcgagtacagcaggaccggcctgcaggcaggactgaccatcgacgagttcgcccccaggctgtccttcttctggggcatcggcatgaacttctacatggagatcgccaagatgcgggccggcaggcggctgtgggcccacctgatcgagaagatgttccagcccaagaacagcaagtcgctgctgctgcgcgcgcattgtcagaccagcggctggtcactcaccgagcaggatccgtacaacaatatcgtgcgaaccgccatcgaggccatggccgcagtgttcggcggcacccagagcctgcacaccaatagcttcgacgaggcgctggggctgcccaccgtgaagagcgcccggatcgcccgaaacacacagatcatcatccaggaggaaagcggcatccccaaggtggccgacccctgggggggcagctacatgatggagtgcctgaccaacgatgtgtacgacgccgccctgaagctgatcaacgagatcgaggagatggggggcatggccaaagccgtggcggaggggattcccaagctgaggatagaagagtgcgctgccaggcgccaagcccggatcgacagcggctcggaggtcatcgtgggcgtgaacaagtaccagctggagaaggaggacgcagtggaggtcctggctatcgacaacacgagcgtgaggaaccggcaaatcgaaaaactgaagaagataaagagcagccgcgaccaggcgctggccgagaggtgcctggccgccctgaccgagtgtgcggcctccggcgatggcaacatcctggccctcgccgtggacgcctccagagccaggtgcaccgtgggggagatcaccgacgccctcaagaaggtgttcggggagcataaggccaatgacaggatggtcagtggggcctaccgccaggagttcggcgagtccaaggagataaccagcgccatcaagagggttcacaagttcatggagagggaaggcagacgccccaggctgctggtcgccaagatgggccaggacggccacgaccgaggtgccaaggtgatcgccaccggcttcgcggacctgggcttcgatgtcgacatcggccccctgttccagaccccccgcgaggtcgcccagcaagccgtcgacgccgacgtgcacgccgtaggggtgagcaccctcgccgcgggccacaaaaccctggtgcctgagctcatcaaagaactcaactccctgggaaggcccgacatactggtgatgtgcggcggcgtgatccccccacaggactacgagttcctcttcgaggtgggcgtgtccaacgtgttcgggcccgggacccggatccccaaggccgccgtccaagtgctggacgacattgagaaatgcctggagaagaagcagcagagcgtg

SEQ ID NO: 751 - DNA, 2250 bp, Artificial Sequence
  Codon optimized sequence that encodes an MCM polypeptide with the I671V mutation
atgctgagggccaagaaccaactgttcctgctgtccccccactacctcaggcaggtcaaggagtcgagcggcagcaggctgattcagcaacggctgctgcaccaacaacagcccctgcaccccgagtgggcggcgctggcgaagaagcagctgaaggggaaaaaccccgaggacctgatctggcacacccccgagggcatcagcataaagcccctgtatagcaaacgcgacaccatggacctcccagaggagctgcccggcgtgaagccgtttacccgcgggccctaccccaccatgtacaccttcaggccctggaccatccgacagtacgccggtttcagcaccgtcgaggagtcaaacaagttctacaaggacaatatcaaggccggccagcaaggtctgagcgtggccttcgacctggcgacccacaggggctacgattccgataatccgagggtgaggggtgatgtgggcatggccggcgtggccatcgacaccgttgaggatacaaaaatcctgttcgacggcatccccctggagaagatgtccgtgagcatgaccatgaacggcgccgtcatccccgtgctggccaacttcatcgtgacaggcgaggagcaaggcgtgcccaaagagaagctcaccgggaccatccagaacgacatcctgaaagagttcatggtgcggaacacctacatattcccacccgagcccagcatgaagatcatcgccgacatcttcgagtataccgccaagcacatgcccaagttcaactccattagcatctccggctatcacatgcaggaggccggcgccgacgccatcctggagctggcctacaccttagccgacggcctggagtactccaggaccggcctccaggccgggctgaccatagatgagttcgcaccccggctgtccttcttctggggcataggcatgaacttctacatggagatcgccaagatgagggccgggcggagactgtgggcccatctgatagaaaagatgttccagcccaagaacagcaagagcctcctgctaagggcgcattgccaaacctccggttggagcctcaccgaacaggacccctacaacaatatagtgaggaccgccatcgaagccatggccgccgtgtttggcggcacccaatccctccacaccaacagcttcgatgaggccctggggctgcccactgtaaagagcgcccgcatcgcacgcaacacccagatcatcatccaggaggaaagcggcattcccaaagtcgccgacccgtggggggggtcctacatgatggagtgcctgaccaacgacgtgtatgacgccgccctgaagctgatcaacgagatagaagagatgggtggcatggcaaaggctgtcgccgagggcatcccgaagctgcggatcgaagagtgcgccgccaggaggcaagcccggatagactccggcagcgaggtgatcgtgggtgtgaacaagtaccagctggagaaggaggacgccgtcgaggtgctggccatcgacaacaccagcgtgaggaacaggcagatcgagaaactcaagaagatcaagagcagccgcgaccaagccctggccgagcggtgtctggccgccctgaccgagtgcgccgcttccggcgacggaaacatcctggccctggccgtcgacgccagccgggcccggtgcaccgtcggcgagatcaccgatgccctgaagaaggtcttcggggagcacaaggccaatgaccggatggtgagtggcgcttacaggcaggagttcggcgagagcaaggaaatcacgagcgccatcaagagggtccacaagttcatggagcgggaggggaggaggcccaggctgctggtggccaagatgggccaggacgggcacgacaggggcgcgaaggtcatcgccacgggcttcgccgacctggggtttgatgtcgacatcggcccactcttccagaccccccgggaggtggcccaacaggccgtcgacgccgacgtccacgccgtgggggtgagcaccctggccgccgggcacaagaccctggtgcctgaactgatcaaggagctgaacagcctgggcaggccagacatactggttatgtgcgggggtgtgatacccccgcaggactacgagttcctctttgaggtgggcgtgagcaacgtgtttggccccggcaccaggatccccaaagccgccgtgcaggtgctggatgatatcgaaaagtgcctggagaaaaagcaacagtccgtg

SEQ ID NO: 752 - DNA, 2250 bp, Artificial Sequence
  Codon optimized sequence that encodes an MCM polypeptide with the I671V mutation
atgctgcgggccaagaaccagctgttcctgcttagtccccactacctccgtcaagtgaaggagtcctccgggagccggctcatacagcagaggctgctccaccagcagcagcccctgcatcccgagtgggccgccctggccaagaagcagctgaagggtaaaaaccccgaggatctgatctggcacacccccgagggcatcagcatcaagcccctctacagcaagcgcgataccatggacctccccgaggagctccccggcgtgaagcccttcacaaggggcccctaccccaccatgtacacctttaggccgtggaccatccggcagtatgccggcttcagcaccgtggaggaatccaacaagttctacaaagacaacatcaaggcggggcaacagggcctgagcgtggccttcgacctggccacccatagggggtacgactccgacaacccgagggtgagaggcgacgtcgggatggccggcgtggccattgacacagtggaggataccaaaatcctgttcgacgggatacccctggaaaagatgtcggtgtccatgaccatgaacggcgccgtaatccccgtgctggcgaacttcatcgtgaccggcgaggaacagggcgtgccaaaggaaaagctgacggggacgatccagaacgacattctcaaggaattcatggtgaggaacacctacatctttccccccgagcccagcatgaaaatcatcgcagacatctttgaatacaccgccaagcacatgcccaagttcaacagcatcagcatctccggctaccacatgcaggaggccggcgccgacgccatactggaactggcatacaccctggccgacgggctcgagtactccaggaccgggctccaggccggactgaccatagacgaattcgccccacggctgtccttcttttggggcatcgggatgaacttctacatggagatcgccaagatgcgagccggccgcaggctgtgggcccacctgatagagaagatgttccagcccaagaactccaagtcactgctgctgagggcccattgccagaccagcggctggagcctcaccgagcaggacccctacaacaacatcgtcaggaccgccatcgaggccatggccgccgtcttcggcggcacccagtccctgcataccaactcctttgatgaggcgctgggcctgcccacagtgaagagcgccaggatcgccaggaatacacagatcatcatacaggaggagagcggcatcccgaaggtggcggacccctgggggggctcgtatatgatggagtgcctgaccaacgacgtgtacgatgccgccctgaagctgatcaacgagatcgaagaaatgggcggcatggccaaggccgtggccgaaggcatccccaagctgcgcatcgaggaatgcgccgcccgcaggcaggccaggatcgattccggcagcgaggtgatcgtcggcgtgaacaagtaccagctggagaaagaggacgccgtggaggtgctcgccattgacaacacctctgtgaggaatcgccagatcgagaaactcaagaagatcaagagctccagggaccaggcgctggccgagcggtgcctggccgcgctgaccgaatgcgccgcctccggggacgggaacatcctggcactcgcggtggacgcctccagggccaggtgcacggtgggcgagatcaccgacgccctgaagaaggtgtttggcgagcacaaggccaatgaccggatggtgtccggcgcctataggcaagagttcggggagagcaaagaaataaccagcgccatcaagcgggtgcacaagtttatggagagggaaggccgccgcccccggctgctggtcgccaagatggggcaggacggccacgaccgcggcgccaaggtgatagcgaccggcttcgccgatctgggcttcgacgtggatatcggccccctcttccagacgccccgggaggtggcgcaacaggcagtggacgccgacgtgcatgccgtgggcgtgtccaccctggccgcaggccacaagaccctggtgcccgagctgatcaaggagctgaacagcctgggtagacccgacatcctggttatgtgtggtggcgtcatccccccccaggactacgaatttctgttcgaggtcggtgtaagcaacgtgttcggccccggcacccggatccccaaggccgccgtgcaggtgctggacgacatcgagaagtgtctggagaagaaacagcagagcgtg

SEQ ID NO: 753 - DNA, 2250 bp, Artificial Sequence
  Codon optimized sequence that encodes an MCM polypeptide with the I671V mutation
atgctgcgagccaagaaccagctgttcctcctgagcccccactacctccggcaggtcaaggaaagctccggttcccggctgatacagcagaggctgctgcaccagcaacaacccctgcaccccgagtgggccgcacttgccaaaaaacagctgaaggggaagaaccccgaggacctgatctggcatacacccgagggcatcagcatcaagcccctgtactcgaaacgtgacaccatggacctgcccgaggagctgcccggcgtgaagcccttcaccagggggccctaccccaccatgtacaccttccgaccctggaccatccggcagtacgccggcttcagcacggttgaggagtcgaacaaattctataaggacaatatcaaagccggccaacagggcctgagcgtggcatttgatctggccacgcaccggggatacgatagtgataacccccgggtcaggggggacgtgggcatggccggcgtagccatcgacacggtggaggacaccaagatactgttcgacggcatcccactggaaaagatgtccgtgagcatgacgatgaacggggccgtgatcccggtcctggccaacttcatcgtgaccggcgaagagcagggggttcccaaggagaagctcaccggcaccatccaaaacgacatcctgaaggagttcatggtgcgcaatacctacatctttcccccggagcccagcatgaagataatagccgacatattcgaatacaccgccaagcacatgcccaagttcaatagcatctccatcagcggataccacatgcaggaagccggcgccgatgccatcctggaactggcctacaccctggctgatggactcgagtacagccggaccgggctgcaagccgggctgaccatcgacgagttcgcccccaggctgagctttttctgggggatcggcatgaatttttacatggagatcgccaagatgcgggccggcaggaggctgtgggcccacctgattgagaaaatgtttcaacccaagaactccaagagcctgctgctgagggcacactgtcaaaccagcgggtggagcctgaccgagcaggacccctacaacaacatcgtaaggacggccatcgaggccatggccgccgtgttcggtggcacccagagcctgcacaccaacagcttcgacgaggccctcgggctgcccaccgtgaagagcgcccgcatcgcccggaatacccagattatcatacaagaggagagcgggatcccgaaggtggccgatccgtggggcggctcctacatgatggagtgcctgaccaacgacgtctacgacgcggcgctgaagctgatcaacgagatcgaggagatgggcgggatggccaaagccgtggccgagggcatccccaagctgcggatcgaggagtgcgccgccaggaggcaggccaggatcgacagcggcagcgaggttatcgtgggggtcaacaagtaccaactggagaaagaagacgccgtggaggtgctcgccatcgacaacaccagcgtgaggaaccggcagattgagaaactgaagaaaatcaagagctccagggaccaggccctggccgagaggtgtctggccgccctgaccgaatgcgcggccagcggcgacggcaacatcctggccttggccgtggatgccagccgagccaggtgcaccgtgggagaaatcaccgacgccctgaagaaggtgttcggcgagcataaggccaatgacaggatggtgtccggcgcctaccgccaggagttcggtgagtcgaaagagatcaccagcgccatcaagcgcgtgcacaagttcatggagagggaaggcaggcggccgcggctgctcgtggccaagatgggccaagatggccacgaccgcggtgccaaagtcatcgccaccgggttcgcggatctgggcttcgacgttgacatcggccccctgttccagaccccccgggaggtggcccagcaggccgtggatgccgacgtgcacgccgtgggcgtgtccaccctggccgccgggcacaaaaccctggtgcccgagctgataaaggagctgaactccctgggaaggcccgatatcctggtcatgtgcggcggcgtgatccccccgcaggattacgagttcctattcgaagtaggcgtgagcaacgtgttcggcccggggaccaggatccccaaggcggccgtgcaggtcctggacgacatcgagaagtgcctggagaagaagcagcaatccgtc

SEQ ID NO: 754 - DNA, 2250 bp, Artificial Sequence
  Codon optimized sequence that encodes an MCM polypeptide with the I671V mutation
atgctgagggccaaaaatcagctgttcctgctgagcccccactacctccggcaggtgaaggaatcctcggggtccaggctgatccagcagaggctgctgcaccagcagcagcccctgcatccggagtgggccgccctggccaagaagcagctcaagggcaagaaccccgaggacctgatctggcacaccccagaaggcatctcgatcaaacccttgtactccaagagggacaccatggacctacccgaggagctgcccggggtgaagcccttcacccgcggcccctatcccacgatgtacacgttcaggccctggaccatccgccagtacgcgggcttcagcaccgtggaggagagcaacaagttttataaagacaacatcaaggccggccagcagggcctgagcgtggccttcgacctcgccacccaccgcggctacgacagcgacaacccccgcgtgaggggcgacgtggggatggccggcgtggcgatcgacaccgtggaggacacgaagatcctgttcgacgggatccccctggagaagatgagcgtctccatgaccatgaatggcgccgtgatcccagtgctggccaacttcatcgtgaccggcgaggagcagggggtcccgaaagagaaactcaccggcaccatccagaacgacatcctgaaggagttcatggtgaggaacacctacatcttccccccggaacccagcatgaaaatcatagccgacatcttcgagtacaccgccaagcatatgcccaaattcaacagcatcagcatatccggctaccacatgcaggaggccggcgccgacgcgatcctggaactggcctacaccctggccgacggtctggagtacagcaggaccggcctgcaggcgggtctcaccattgacgagttcgcgccgaggctgtccttcttctggggcatcggcatgaacttctatatggagatagccaagatgagggccggcagaaggctgtgggcccatctgatcgagaaaatgttccagccgaagaatagcaagtccctgctgctgagggcccactgtcagaccagcgggtggtccctaaccgagcaggacccctacaacaacatcgtgcggaccgcgatcgaagccatggcggccgtgttcgggggcacccagagcctgcacacgaacagcttcgacgaggccctaggcctgccaacggtgaagtccgccaggatcgcgaggaacacgcagatcatcatccaagaggaaagcgggatccccaaagtggccgacccctggggcggtagctacatgatggagtgcctcaccaacgatgtgtacgacgcggccctgaaactcattaatgagatcgaagagatgggcggcatggccaaagccgtggccgagggcatccccaagctgagaatcgaagagtgcgccgctaggcggcaagcccggatcgacagcggcagcgaggtgatagtgggcgtcaacaagtaccaactggagaaggaagacgccgtggaggtgctggcgatcgacaacacttcggtgcggaatcgtcagatagagaagctgaagaagatcaagtccagccgagaccaggccctggccgagaggtgcctggccgccctgacagagtgcgccgcctccggcgacggcaacatcctcgctctcgccgtagatgccagcagggcgcgctgtaccgtgggcgagatcaccgacgccctgaaaaaggtgttcggggaacacaaggccaacgaccggatggtgtctggcgcctaccgccaggagttcggggagtccaaggagatcaccagcgccatcaagcgcgtacacaagttcatggagagggagggcaggcgccccaggctgctcgtggccaaaatgggacaggacgggcacgacaggggcgccaaggtgatcgcgaccggattcgcggacctgggcttcgacgtggacataggacccctgttccagacccccagggaggtcgcccagcaggccgtggatgcggacgtgcatgccgtgggcgtctccaccctggccgccggtcacaagaccctggtgcccgagctgataaaggagctgaacagcctggggaggcccgacatcctggtgatgtgcggcggcgtgatccccccccaggattacgagttcctgttcgaagtgggtgtatccaacgtgttcggacccggcacccgcatcccgaaggccgccgtgcaggtcctggatgacattgagaagtgcctggagaagaagcagcagagcgtg

SEQ ID NO: 755 - DNA, 2250 bp, Artificial Sequence
  Codon optimized sequence that encodes an MCM polypeptide with the I671V mutation
atgctgagggccaagaaccagctgttcctgctgagcccccactatctgcgccaggtaaaggagagcagcgggtccaggctgatccagcagaggctgctgcaccagcagcagcccctccaccccgagtgggccgccctcgccaaaaagcagctcaaggggaagaaccccgaagacctgatatggcacacccccgaggggatctccatcaaacccctctattccaagagggacaccatggatctgccggaggagctgcccggagtgaagccctttacaaggggcccctaccccaccatgtataccttccggccctggaccatccgtcagtacgccggcttctcgaccgtcgaggagagcaacaagttctacaaggacaacatcaaggccgggcagcagggactcagcgtggcgtttgacctggccacacataggggctacgactccgacaatccccgggtgaggggcgatgtggggatggccggcgtggccatcgacaccgtcgaggacaccaaaatcctgtttgacggcatccccctggaaaagatgagcgtgtccatgaccatgaacggcgccgtgatccccgtgctagccaacttcatcgtgaccggcgaggaacaaggcgtgcccaaggagaagctcaccggcaccatccagaacgacatcctcaaggagttcatggtccgtaatacctacattttcccccccgaacccagcatgaaaatcatcgccgacatcttcgagtacacggccaaacacatgcccaagttcaactccatcagcatcagcggctaccacatgcaggaggccggggccgacgccatcctggagctggcctacaccctggccgacgggctggagtacagcaggaccggtctccaggccgggctgaccatcgacgagtttgccccaaggctgagctttttctggggcatcggcatgaacttttacatggagatcgcgaagatgcgcgccgggcgtcggctgtgggcccacctgatcgagaagatgtttcagcccaagaactcgaaaagcctgcttctgcgggcccactgtcagaccagcggctggtccctgaccgagcaggacccctacaataacatcgtgagaaccgcgatcgaggccatggcggccgtcttcggcgggacccaaagcctgcacactaacagcttcgacgaggccctgggtctccccaccgtgaagagcgccaggatcgcacgtaacacgcagatcatcatccaggaggagagcgggatccccaaggtggccgacccctggggcgggagctacatgatggagtgcctgaccaatgacgtgtacgacgctgctctgaagctgatcaacgagatagaggagatggggggcatggccaaggccgtcgccgagggcatccccaagctgaggatcgaggaatgtgccgccaggcggcaagcccggatcgacagcggcagcgaagtgatcgtcggcgtgaataagtaccagctggagaaagaggacgccgtggaagtgctcgccatcgacaacacctcagtccgtaacaggcagatagagaaactgaagaagataaagagctcccgcgaccaggccctggccgagcgttgcctggccgccctgactgagtgcgccgccagcggcgacggtaacatactagctctggcggtggacgccagccgggcgaggtgcaccgtcggggaaatcaccgacgcgctgaagaaagtgttcggagagcacaaggccaacgataggatggtgagcggggcctatcggcaagagttcggagaaagcaaggaaatcaccagcgccatcaagcgcgtgcacaagttcatggagagggagggcaggaggccgagactgctggtggccaagatgggccaggacggccacgaccgcggcgccaaggtcattgccaccggcttcgccgacctcgggtttgacgtggacatcggccccctgttccagacgccccgggaagtggcccagcaggccgtggacgccgatgtgcacgccgtgggcgtgtcgaccctggccgccggccacaagaccctggtgcccgagctgatcaaggagctgaacagcctgggtaggccagacattctggtgatgtgcggtggagtcattcccccccaggactacgagttcctgttcgaggtcggggtgagcaacgtgttcggccccggaacccgcatccccaaagccgccgtgcaggtgctggacgacatagagaagtgtctggaaaagaaacagcaaagcgtg

SEQ ID NO: 756 - DNA, 2250 bp, Artificial Sequence
  Codon optimized sequence that encodes an MCM polypeptide with the I671V mutation
atgcttagggccaagaaccagctgttcctcctctccccccactatctcagacaggtgaaggagagcagcggcagcaggctgatccaacagaggctcctccaccagcagcagcccctccacccggagtgggcagccctggctaagaaacagctgaaagggaagaatcccgaggatctgatctggcacaccccggaggggatatccataaagcccctgtattcgaagagggacaccatggacctgcccgaggagctgcccggcgtgaagccctttacccgcggaccctaccccaccatgtataccttcaggccctggaccatccggcagtacgccggtttctctaccgtggaggagtccaacaagttctacaaggacaacatcaaggccggtcagcagggcctcagcgtggccttcgatctggccacccaccggggctatgattccgacaacccgagggtccgcggcgacgtggggatggccggcgtggcaattgataccgtggaagacaccaagatcctgtttgacggcatccccctggagaagatgagcgtgagcatgaccatgaacggcgcagtgatccccgtgctggcaaatttcatcgtcaccggggaggagcagggcgtgccaaaggagaagctgaccggcaccatccagaatgatatcctgaaggagttcatggtcaggaatacctacatcttcccacccgagcccagcatgaaaatcatcgcggacatcttcgagtacaccgccaagcacatgcccaagttcaattccatcagcatctccgggtaccacatgcaggaggccggcgccgacgccatcctggagctcgcctacaccctggccgacgggctggagtatagccggacgggcctccaggccgggctcaccatagacgagttcgccccgaggctgagcttcttctggggcatcgggatgaacttctatatggaaatcgccaaaatgcgcgcggggcgccgtctttgggcccacctgattgagaagatgttccagccgaagaacagcaagtccctgctgctgcgcgcccattgccagacctccgggtggagcctcaccgaacaggacccctacaataacatcgtcaggaccgccatcgaggccatggccgccgtgttcggcgggacccagtccctccacaccaacagcttcgacgaggcactgggtctccccacagtgaaaagcgccaggatcgccaggaacacccaaatcatcatccaggaagaaagcggcatcccgaaggtggccgacccctggggcggcagctacatgatggagtgcctgaccaacgatgtgtacgatgccgccctgaagctcatcaacgagatcgaggagatggggggcatggccaaagccgttgccgaaggaataccaaagctgcgtatcgaggagtgcgccgcgaggaggcaggcgcgcatcgacagcgggtccgaggttatcgtgggcgttaacaagtatcagctggagaaggaggacgccgtggaggtgctggccatcgacaacacctccgtgaggaacaggcagatagagaagctgaagaaaatcaagagctccagggaccaagcgctggccgagaggtgcctcgccgcgctgacggagtgcgccgccagcggcgatggcaacatcctggccctggccgtggacgccagcagggcccggtgtacagtgggcgagatcaccgacgccctcaagaaggtgtttggggagcacaaggcgaacgacaggatggtgtccggcgcctaccggcaggagtttggcgagtcaaaagaaataacctccgccatcaagcgggtgcacaagttcatggagagggaggggaggaggcctaggctgctggtggccaagatgggccaggatggccacgacaggggcgccaaagtaatcgccacgggcttcgccgacctcgggttcgacgtggacataggacccctgttccagaccccccgggaggtggcccagcaggccgtcgacgccgacgtacatgccgtcggcgtgtccaccctggccgcaggccacaagaccctggtgcccgagctgatcaaggagctcaacagcctgggcaggcccgacattctcgtcatgtgcggcggtgtgatccccccccaggactacgagtttctgttcgaggtgggcgtcagcaacgtattcgggcccggcacgaggatccccaaggctgccgtgcaagtgctggacgacattgagaaatgcctggagaagaagcagcagtccgtg

SEQ ID NO: 757 - DNA, 2250 bp, Artificial Sequence
  Codon optimized sequence that encodes an MCM polypeptide with the I671V mutation
atgctgcgcgccaagaaccagttgttcctcctgagcccccactacctacggcaggtcaaagagtccagcggcagccggctcatccagcaaaggctgctgcatcagcagcagcccctgcaccccgagtgggccgcccttgccaagaaacagctgaagggcaaaaaccccgaagacctgatctggcacacccccgaaggcatcagcatcaagcccctgtacagcaagcgcgacaccatggacctgcccgaggaactgcccggcgtgaaacctttcacgaggggcccgtaccccaccatgtataccttccgcccgtggacgatcaggcagtatgctggcttcagcaccgtggaggagagcaacaagttttacaaagacaacatcaaggccgggcagcaggggctgagcgtcgccttcgacctcgccacccaccgcggctatgacagcgataatccccgggtgaggggggacgtgggcatggccggcgtcgcgatcgacacggtggaggacaccaagatcctcttcgacgggatccccctggagaagatgagcgtgagcatgactatgaacggcgccgtgatccccgtgctcgccaatttcatcgtgacgggcgaggagcaaggcgtgccgaaagagaagctgaccggcacgatccagaacgatatcctgaaggagtttatggtgaggaacacctacatcttccccccggagcccagcatgaagatcatcgcggacatcttcgaatacaccgcgaaacacatgcccaagtttaatagcatcagcatttccggctaccacatgcaggaggccggcgccgatgccatcctcgaactggcctacaccctcgccgacggtctggagtactccaggacagggctccaggccggactgaccatcgacgagttcgcccccaggctgagtttcttttggggcatcggcatgaacttctacatggagatcgccaaaatgagggccggcaggaggctgtgggcgcacctgatcgaaaagatgttccaaccgaagaatagcaaaagtctgctgctccgcgcccattgccagacatccggctggagcctgaccgagcaggatccctacaacaacatcgtgagaaccgccatcgaggccatggccgccgtgttcggcggcacccagtccctgcacactaacagcttcgacgaagccctgggcctccccaccgtgaaaagcgccaggatcgcccggaacacccagatcataatccaagaggagtctggcatcccgaaggtggcggacccgtggggcggctcctatatgatggagtgcctgaccaacgacgtgtacgacgccgccctgaaactcatcaacgagatagaagaaatgggcggcatggcgaaggccgtcgccgagggcatccccaagctgaggatcgaagagtgcgccgccaggaggcaggccaggatcgatagcggctccgaggtgatcgtgggcgtgaataagtaccaactggagaaggaggacgccgtggaggtgctggccattgacaacacctccgtcaggaacaggcagatcgagaaactgaagaagatcaagagctcacgggaccaggcgctggccgaacgatgcctggccgccctgaccgaatgcgcggccagcggggacggcaacatcctggccctggccgtggatgcgtccagggcgaggtgtaccgtgggcgagatcaccgacgccctcaagaaggtgttcggcgagcacaaggccaacgaccggatggtctccggcgcctacaggcaagagttcggggagtccaaggagattaccagcgccatcaagagggtccacaagttcatggagagggagggcaggcgcccccggctcctagtggccaagatgggccaggacggccacgacaggggggccaaggtgatcgcgacgggatttgccgatctgggcttcgacgtggacatcggccccctgttccagacgcccagggaggtggcccaacaggccgtggacgccgacgtgcacgccgtgggcgtctccactctggctgccggccataagaccctggtgcccgaactcattaaggaactgaatagcctcgggcgtcccgacatactggtgatgtgcggcggggtgatccccccacaggactacgaattcctgttcgaggtgggggtctccaacgtgttcggccccggtacccggatccccaaggcagccgtgcaggtactcgacgacatcgagaagtgtctggagaagaagcagcagagcgta

SEQ ID NO: 758 - DNA, 2250 bp, Artificial Sequence
  Codon optimized sequence that encodes an MCM polypeptide with the I671V mutation
atgctaagagcgaagaatcagctgttcctcctgagcccccattacctgagacaggtgaaggaatccagcggctcccgcctgatacagcagaggctgctccaccagcagcagcccctgcaccccgagtgggccgccctggccaaaaagcagctcaagggcaaaaaccccgaagacctgatctggcacaccccagaggggatctccatcaaaccgctgtacagcaagagggacaccatggacctgcccgaggaactgcccggggtgaagccgttcaccaggggcccctaccccaccatgtatacgttcaggccctggaccatcaggcagtacgccggattcagcacggtggaggaaagcaacaagttctacaaggataacataaaggccgggcagcagggcctgagcgtggccttcgacctggccacccaccgaggctacgacagcgataaccccagggtgcggggcgatgtcggaatggccggcgtggccatcgacacggtcgaggacaccaagatcctcttcgacgggatccccctcgagaaaatgtccgtgtccatgaccatgaacggcgccgtgatccccgtgctggccaatttcatcgtgaccggggaggagcagggcgtgcccaaggagaagctgaccggcaccatccagaacgacatcttgaaggaattcatggtgcgaaacacctacatcttcccccccgagccaagcatgaagatcatcgcggacatcttcgaatacaccgccaagcacatgcccaaatttaatagcatctccatctccggctatcacatgcaggaggccggtgccgacgcgatcctggagctggcctataccctcgccgacggtctggagtacagccggaccggcctccaggccggcctcaccatcgacgaattcgccccgcggctgagcttcttctggggcatcggcatgaacttctacatggagatcgccaagatgagggccggccgcaggctgtgggctcatctcatcgagaagatgttccagcccaagaactcgaagagcctgctcctgagggcccattgccagaccagcgggtggtccctgaccgagcaggatccctataacaatatcgtgcgtaccgccatcgaagccatggcagccgtgttcggcggcacccagagcctccacaccaacagcttcgacgaagccctgggcctgcccactgtgaagtccgccaggatcgcccggaacacccagatcatcatccaagaggagagcgggatccccaaggtggccgacccctgggggggcagctacatgatggagtgcctgaccaacgacgtgtatgacgccgccctcaagctcatcaacgagatcgaagagatgggcggcatggctaaggccgttgccgagggcatccccaagctgaggatcgaggagtgcgcagcccggaggcaggccaggatcgatagcggctcggaagtgatcgtgggggtgaacaagtaccagcttgagaaggaggacgccgtggaggtgctggccatcgacaatacctccgtgagaaacaggcagatcgaaaagctgaagaaaatcaagagctccagggaccaggcgctcgcggagcgatgcctcgccgccctgaccgagtgtgccgcctcgggtgacgggaacatcctggccctcgccgtcgacgcctccagggcccggtgcaccgtgggcgagatcaccgacgccctgaagaaggtgttcggcgagcataaagccaacgacaggatggtgagcggcgcctacaggcaggagtttggcgagagcaaggagatcaccagcgctatcaagagggtgcacaagttcatggaaagggaggggaggaggccccgcctgctggtcgccaagatgggccaagacgggcacgataggggcgccaaggtgatcgcgaccggcttcgccgacctgggatttgacgtggacatcgggccactgttccagacgccccgggaggtcgcccagcaggccgtcgacgccgacgtgcacgcggtgggcgtgagcacactggcagccggccacaaaaccctggtgccggagctgatcaaagagctgaacagcctgggaaggcccgacatcctggtcatgtgcggcggagttatccccccccaggactacgaattcctgttcgaggtgggcgtcagcaacgtgttcgggcccggtaccaggatccccaaggccgccgtccaggtgctggacgacatcgagaaatgcctggaaaagaaacaacaaagcgtg

SEQ ID NO: 759 - DNA, 2250 bp, Artificial Sequence
  Codon optimized sequence that encodes an MCM polypeptide with the I671V mutation
atgctgcgcgccaagaatcagctgttcctgctgagcccccactacctgcgccaggtgaaggaatcgagcggatcgaggctgatccagcagaggctgcttcaccagcagcaaccccttcaccccgagtgggccgcactggcgaagaagcaactgaagggtaagaaccccgaagacttaatctggcacacccccgaagggatcagcatcaagcccctgtacagcaaaagggacaccatggacctgccggaggagctgcccggggtgaagcccttcaccaggggcccctaccccacgatgtacaccttccggccctggactatccgtcagtacgccggcttttccacagtggaggagagcaacaagttttataaggacaacatcaaggccggccagcaaggcctgagcgtggcgtttgacctggccacccacaggggctacgactccgacaacccacgggtgaggggcgacgtcggcatggccggggtggccatcgacaccgtggaggacaccaagatcctgttcgacggcatccccctcgagaaaatgagcgtgtccatgaccatgaacggcgccgtgattccggtgctggccaacttcattgtcaccggagaggagcaaggcgtgccaaaggagaagctgaccgggaccatccagaacgacattctgaaagagttcatggtgcgcaacacgtacatattcccccccgagcccagcatgaagatcatcgctgacatcttcgagtacaccgccaagcatatgcccaagttcaacagcatcagcatctccggctaccacatgcaagaagccggcgccgatgccatactcgagctcgcctacaccctggccgatggtctggaatactccaggacgggcctgcaggcgggcctcaccatcgacgagtttgcgcccaggctgagcttcttttggggcatcggcatgaacttctacatggaaatcgccaagatgagggccggcaggcgcctgtgggcgcacctcatcgagaagatgttccagccgaagaactccaaaagcctgctgctgcgggcccattgtcagacctccggctggtccctcacggagcaggatccctacaataacatcgtgcgcaccgccatcgaggcaatggccgccgttttcgggggcacgcagagcctgcacacaaacagcttcgacgaggcgctgggcctgcccaccgtcaagtccgccaggatcgcccgaaacacccagatcatcatccaggaggagagcgggatcccgaaagtggcggacccctggggcggcagctatatgatggagtgcctgaccaacgacgtctacgacgccgccctgaagctgatcaacgagatcgaggaaatgggcgggatggcgaaggccgtcgccgagggcatccccaagctgcgcattgaggagtgcgccgcgaggcgccaggcccggatcgatagcggctccgaggtgatcgtcggggtcaacaaataccaactggagaaggaggacgccgtagaagtgctcgcgatcgacaacaccagcgtgaggaaccgccagatcgaaaagctcaagaagatcaagagcagccgggatcaagccctggccgagagatgcctggccgcgctcactgagtgcgccgccagcggggacggcaacatcctggcgctggccgtggatgccagccgcgccaggtgcaccgtcggcgagatcacggacgccctgaagaaggtcttcggagagcacaaggccaacgaccggatggtcagcggcgcgtacaggcaggagttcggcgagtctaaggagatcacctccgccatcaaaagggtgcacaaattcatggaacgggagggcaggaggccgaggctgctggtggccaagatgggccaggacgggcacgatcgcggcgccaaggtcatcgccacgggcttcgccgacctgggtttcgacgtggacatcggcccactgttccagaccccccgggaggtggcccagcaggccgtggatgccgacgtgcacgccgtgggcgtgagcaccctggccgccggacacaagaccctcgtgcccgagctcataaaggagctgaacagcctgggcaggcccgacatactggtgatgtgcgggggcgtgatcccccctcaagactatgagtttctgtttgaggtcggggtgtccaacgtgttcggaccgggcacccgcatcccgaaggccgccgtgcaggtgctggacgacatcgagaagtgcctggagaaaaaacaacagagcgtg

SEQ ID NO: 760 - DNA, 2250 bp, Artificial Sequence
  Codon optimized sequence that encodes an MCM polypeptide with the I671V mutation
atgcttcgggcgaagaaccagctgttcctgctgtccccgcactacctcaggcaggtgaaggagagctccggcagccgcctgatccagcagaggctgctgcaccagcagcagcccctgcacccggagtgggccgcgctggccaagaagcagctgaagggcaagaaccccgaggacctgatatggcacacccccgagggcatctccatcaagccgctgtattcgaagagggacaccatggacctgcctgaggagctgcctggggtaaagcccttcaccagggggccctaccccaccatgtacacctttcggccatggaccatccggcaatatgccgggttctcaaccgtggaggagagcaacaagttctacaaggacaacattaaggcggggcagcaggggctgtccgtggcgttcgacctggccacccaccggggctatgacagcgacaatccccgggtgaggggggacgtgggcatggcgggcgtggccatcgatacagtcgaggacacgaagatactgtttgacggcatccccctggagaaaatgtcggtgtcgatgacgatgaacggcgccgtgatcccggtgctggccaacttcatcgtgaccggcgaggagcagggggtgcctaaggagaaactgaccgggaccatccagaacgacatcctgaaggagttcatggtgcgcaacacctacatatttccccccgagcccagcatgaagatcatcgccgacatcttcgaatacaccgccaagcatatgcccaagttcaacagcatcagcatctccgggtaccacatgcaggaggccggcgccgacgccatcctggaactggcctacaccctggccgacggcctggagtacagcagaaccgggctccaggcaggcctgaccatcgacgagttcgccccacggctgtccttcttctgggggatcggcatgaacttctatatggagatcgccaagatgagggccgggcggaggctctgggcccatctgatcgagaagatgttccagccaaagaacagcaagagcctcctgctgagggcccactgccagaccagcggctggtccctgaccgagcaggacccctacaacaacatcgtcaggacggccatcgaggcgatggccgccgtgtttggaggcacccagagcctgcataccaacagcttcgacgaggccctgggcctgcccactgtgaagagcgccaggatcgccaggaacacccagatcatcatccaggaggagagcggcatccccaaggtggcggacccttggggtggctcctacatgatggaatgcctcacaaatgatgtgtacgacgccgccctcaaactgatcaacgaaatcgaggagatgggtggcatggccaaagccgtagcggagggcatccccaagctccggatcgaggagtgcgccgccaggcgacaggcccggatcgacagcggctccgaggtcatcgtcggggtgaacaagtaccagctcgaaaaggaggacgccgtggaggtgctggcgatcgacaacaccagcgtgcggaacaggcagatagagaagctgaagaagatcaagagcagtagggaccaggccctcgccgagaggtgtctggccgccctgaccgagtgcgccgcctccggcgatggcaacatcctggcccttgccgtggacgcgagccgcgccaggtgcaccgtgggcgagatcaccgacgccctgaagaaggtgtttggcgaacacaaggccaacgacaggatggtgtccggcgcctaccgtcaggagttcggcgagagcaaggagatcaccagcgccatcaagagggtgcacaagtttatggaacgcgaagggaggcgccccaggctgctggtggccaagatggggcaggacgggcacgacaggggcgccaaagtcatcgccaccggctttgccgacctgggattcgatgtggacatcggccccctgtttcagacccccagagaggtcgcccaacaggcggtcgacgccgacgtccatgccgtcggcgtgagcaccctggccgccgggcacaagacgctcgtgcccgagctgatcaaggagctgaacagcctgggcaggcccgacatcttagtgatgtgcgggggggtgattcccccccaggactatgagttccttttcgaagtgggtgtcagcaacgtgttcggcccgggcacccgcatccccaaggctgcggtccaggtgctggacgacatcgagaagtgcctggagaagaaacagcaatccgtg

SEQ ID NO: 761 - DNA, 2250 bp, Artificial Sequence
  Codon optimized sequence that encodes an MCM polypeptide with the I671V mutation
atgctgagggccaagaaccagctgtttctcctgtcgccccactacctgaggcaggtgaaggagtcctccggcagcaggctcattcagcagaggctgttgcaccagcagcagcccctgcacccagagtgggccgccctcgccaagaagcagctgaaggggaagaaccccgaggacctgatctggcatacgcccgagggtatctccataaaacccctctacagtaagagggacaccatggacctgcccgaggaactgcccggcgtgaagccgttcacgcggggcccataccccaccatgtacaccttccggccgtggaccatcaggcaatacgccggcttcagcaccgtggaggagagcaacaagttctacaaagacaacatcaaagccggtcagcaagggctgagcgtagccttcgacctggccacccacaggggctacgactccgacaaccccagggtgcgcggcgacgtgggcatggccggcgtggccatcgacaccgtggaagacaccaagatcctcttcgacggcatccccctggaaaagatgtccgtgtccatgaccatgaacggggccgttataccggtgctggccaacttcatagtcaccggcgaggagcagggggtcccgaaggagaagttaaccggcacgattcagaacgacatcctgaaagagttcatggtgaggaacacctatatcttcccccccgagccctccatgaaaatcatcgccgacatcttcgagtacaccgcgaagcacatgcccaagttcaactccatcagcatctccggatatcacatgcaggaagccggcgccgacgccatcctggagctggcctacaccctggcggacggactggagtacagccgcacgggcctgcaggcgggcctgaccatagacgaatttgccccgcggctgagctttttctgggggatcggcatgaatttctacatggagatcgccaagatgcgggccggcagacggctgtgggcccatctgatcgaaaaaatgttccagcccaaaaacagcaagtccctgctgctgcgggcccactgccagaccagcggctggagcctgaccgagcaggacccgtacaataacatcgtgaggaccgccatcgaggccatggccgccgtgttcggcgggacgcaaagcctgcacacgaactccttcgacgaggcgctcggcctgcccaccgtgaagtccgctaggatcgccaggaacacacagatcatcatccaggaggagagcggcatccccaaggtggccgacccctggggcggctcctacatgatggagtgcctgacgaacgacgtgtacgacgccgccctgaagctgatcaacgagatcgaggagatgggcggcatggccaaggccgtcgccgagggcatccccaagctgcgcatcgaggagtgcgccgccaggcgccaagcccggatcgatagcggcagcgaggtgatcgtgggggtgaacaagtaccagctggagaaggaggacgcggtcgaggtcctggccatagacaacacgagcgtgcggaacaggcagatcgagaagctcaagaaaatcaagagcagccgggaccaggccctggccgaaaggtgcctcgccgccctcacggaatgcgccgccagcggcgacggcaatatcctggccctggcggtcgatgccagccgcgctcggtgcaccgtgggggagatcaccgatgccctcaagaaagtgttcggggagcacaaggccaacgacaggatggtgtccggcgcctacaggcaggagttcggcgaaagcaaggaaatcacgagcgccatcaagcgggtccataagttcatggagagggagggccggaggcccaggctgctcgtggccaaaatgggccaggacggccatgacaggggcgccaaggtgatcgccaccgggttcgccgacctcggcttcgacgtggacatcgggccgctgttccagacgccgcgggaggtcgcccagcaagcggtggacgccgacgtgcacgccgtcggggtgagcaccctcgccgctgggcataagaccctggtgcccgagctgatcaaagagctcaacagcctcggcaggcccgacattctcgttatgtgcggcggcgtcatcccgccccaggactacgagttcctgtttgaggtcggcgtctccaacgtgttcggcccaggcaccaggatccccaaggccgccgtgcaggtgttggacgatatcgagaaatgcctcgagaaaaagcagcagagcgtc

SEQ ID NO: 762 - DNA, 2250 bp, Artificial Sequence
  Codon optimized sequence that encodes an MCM polypeptide with the I671V mutation
atgctgagggcgaagaatcagctgtttctgctgagcccccactacctcaggcaggtgaaggagagcagcggcagcaggctgatccagcagaggctgctgcaccagcagcaacccctgcaccccgagtgggcggccctggccaagaagcagctcaagggcaagaaccctgaagacctgatctggcacacccccgagggaatcagcatcaagccgctgtactccaagagggacaccatggacctgcccgaggagctccccggcgtcaagcccttcacccggggcccctaccccaccatgtacaccttcaggccctggaccatccgccagtacgcgggcttctccaccgtggaagagtccaacaagttctacaaggacaacatcaaggccgggcaacagggcctctccgtggccttcgacctggccacgcaccggggttacgattctgacaacccgcgcgtgcggggcgacgtcgggatggccggggtcgcgatcgacaccgtcgaggataccaagatcctgttcgacggcatccccctcgagaagatgagcgtcagcatgaccatgaacggcgccgtgatccccgtgctggccaacttcatcgtcaccggcgaggagcagggggtccccaaagagaagctaaccggcaccatccagaacgacatcctgaaggagttcatggtgaggaacacctatatcttcccgcccgagcccagcatgaagatcatcgccgacatcttcgagtacaccgccaagcacatgcccaagttcaacagcataagcatcagcgggtaccacatgcaggaggccggtgcggacgccatcctcgagctcgcctataccctggcagacggtctggagtacagcaggaccggactgcaagccgggctgacgatcgacgaattcgcccccaggctgagcttcttctggggtattggcatgaacttctacatggagatcgccaagatgagggccggcaggcggctctgggcccacctcatcgagaagatgttccagcccaagaacagcaagtccctgctgctcagggcccactgccagacaagcgggtggagcctcaccgagcaggacccgtacaacaacatcgtgcgcaccgccatcgaagccatggcggccgtcttcggcggcacccagagcctgcataccaacagcttcgacgaggctctgggcctgcccacggtgaagtccgccaggatcgcccggaacacccagattataatccaggaagagagcggcattcccaaggtggcggacccatggggtggcagctacatgatggaatgcctcaccaatgacgtgtacgacgcggccctgaagctgatcaacgagatcgaggagatgggggggatggccaaggccgtggccgagggcatccccaagctgaggatcgaagagtgcgccgcccgaaggcaggcccggatcgacagcggcagcgaagtcatcgtgggcgtgaacaagtaccaactcgagaaggaggacgcagtcgaagtgctcgccatcgacaacaccagcgtgaggaaccggcagatcgagaagctgaagaagatcaagtcctccagagaccaggccctggccgagaggtgcctggccgccctgacggaatgcgccgccagcggcgacggaaacatcctggccctggccgtagacgccagcagggccaggtgtaccgtgggcgagatcacggacgcgctgaaaaaggtctttggcgagcacaaagccaacgacaggatggtgagcggcgcctatcgccaggagttcggcgagtccaaggaaatcaccagcgccatcaagcgggtccacaagttcatggagagggagggacgccgcccccggctgctggtggccaagatgggccaggacgggcatgacaggggggccaaggtgatcgccacgggctttgccgatctgggcttcgatgtggacatcggccccctgtttcagacgcccagagaggtggcccaacaggccgtggacgccgacgtgcacgccgtgggtgtctccaccctggccgccggccacaagacgctcgtgcccgagctgatcaaggagctgaactccctgggccgccccgatatcctggtgatgtgcgggggggtgatccccccccaggactacgagttcctgtttgaggtgggcgtgtccaacgtgttcgggcccggcaccaggatccccaaggccgccgtgcaggtgctggacgacatcgagaagtgtctggaaaaaaagcaacagagcgtg

SEQ ID NO: 763 - DNA, 2250 bp, Artificial Sequence
  Codon optimized sequence that encodes an MCM polypeptide with the I671V mutation
atgctgagggccaagaaccagctgtttctgctgagcccccactacctgcggcaggtgaaggaaagctccggcagccggctgattcagcagcgcctgctgcaccagcagcagcccctgcatcccgagtgggccgccctggccaagaagcagctgaagggcaagaaccccgaggacctgatctggcatacccccgaagggatctccatcaagcccctgtactccaagagggatacgatggacttgcccgaagagctccccggcgtgaaacccttcacccggggcccttacccgactatgtacaccttcaggccctggaccatcaggcagtacgccggcttctccaccgtggaggagagcaacaagttctacaaggataatatcaaggccggccagcagggcctcagcgtggccttcgacctggccacccaccgtggctacgacagcgacaacccccgcgtccggggcgatgtgggaatggccggcgtggccatcgataccgtggaggatacgaagatactattcgacggtatccccctggagaagatgagcgtgagcatgaccatgaacggcgcggtgatacccgtgctggccaacttcatcgtcacgggggaggagcaaggcgtgcccaaagaaaagctgaccggcaccatccagaacgacatcctcaaggaattcatggtgcggaacacctacatcttcccccccgagccctccatgaagattatcgccgatatcttcgagtacaccgccaagcacatgcccaagttcaatagcatctccatctccggctaccacatgcaagaggccggcgccgacgcaatcctggagctggcctacacactcgccgatggcctggagtattccaggaccggcctgcaggccggcctgaccatcgacgagttcgcccccaggctgagcttcttttggggcattggcatgaatttctacatggagatcgcgaagatgagggccggccggcggctgtgggcacacctgatcgaaaagatgttccaacccaagaacagtaagagcctgctgctgagggcccactgccagaccagcggctggagcctgaccgagcaggacccctacaataacattgtgcggaccgccatcgaggcgatggccgccgtgttcggcggcacacagagcctgcacaccaacagctttgatgaggccctcggcctgcccacggtgaagtccgccaggatcgccaggaacactcagatcatcatccaggaggaaagcggcatccccaaagtggccgacccctggggcggcagctacatgatggagtgcctgaccaacgacgtctacgatgccgccctgaaactcatcaacgagattgaggagatgggcggcatggccaaggccgtggccgaggggatccccaaactgaggatcgaagagtgcgccgcccggaggcaggcccgtatcgactccggctccgaggtcatcgtgggggtgaataaataccagctggaaaaggaggacgccgtggaggtcctcgccatcgacaacacctcggtccgcaaccggcagatcgagaagctcaaaaagatcaagtcctcgagggatcaggccctcgccgagaggtgcctggccgccctgacggagtgcgcggccagcggggatggcaacatcctcgccctggcggtggacgcctcccgcgccagatgtactgtcggcgagatcaccgacgccctcaagaaagtgttcggcgagcacaaggccaacgacaggatggtgtccggcgcctatcgtcaggagtttggcgagtccaaggaaatcaccagcgccatcaagagggtgcacaagttcatggagagggaggggcggcgaccccgcctgctggtggccaagatgggtcaggacgggcacgataggggcgccaaggtgattgccaccggattcgccgacctgggcttcgacgtggacatcggccccctgttccagacacccagggaagtggcccagcaggccgtggacgcggacgtgcacgccgtgggcgtgtcgaccctcgccgccggtcataagaccctcgtgcccgagctgatcaaggagctgaacagcctgggcaggcccgatatcctggtgatgtgtgggggcgtaatccccccgcaggattacgagttcctgttcgaagtgggggtgtccaacgtgttcgggcccggcacccggattcccaaggcggccgtgcaggtgctggacgacatcgagaagtgtctggaaaagaagcaacagagcgtg

SEQ ID NO: 764 - DNA, 2250 bp, Artificial Sequence
  Codon optimized sequence that encodes an MCM polypeptide with the I671V mutation
atgctgagggcaaaaaaccagctcttcctgctcagcccccactacctcaggcaagtgaaggagtcctccggctcccgtctgattcagcagaggctgctgcaccagcagcagcccctgcaccccgagtgggccgccctcgcgaagaaacagctcaaggggaagaacccggaggacctcatctggcacacccccgagggaatcagcatcaagcccctctactccaagagggataccatggacctgcccgaggagctgcccggcgtgaaacccttcacccgtggcccctaccccacgatgtacaccttcaggccctggaccatccgccagtacgccggcttctccaccgtggaggagtccaacaaattctacaaagacaatatcaaggccggacaacagggcctctccgtggcattcgatctggctacacacagggggtacgactccgacaaccccagggtgcggggcgacgtcggtatggccggggtcgccatcgacacggtggaagacaccaagatcctgtttgacggcatccccctggagaaaatgagcgtgtccatgaccatgaacggcgccgtgatccccgtcctggccaacttcatcgtgaccggcgaagagcagggcgtgcccaaagagaagctgaccggtaccatccaaaacgacatcctgaaagagtttatggtccggaacacctacatcttcccccccgagcccagcatgaaaatcattgcagatatattcgagtacaccgccaaacatatgcccaagttcaacagcatctccatatccgggtatcacatgcaggaggccggggccgacgccatcctggagctggcctacaccctggccgacggcctggagtattcccgaacgggcctccaggccgggctgacaatcgacgagttcgcccccaggttgagcttcttctggggcataggaatgaacttctacatggaaatagccaagatgagggccggcaggagactgtgggcccacctgatcgagaagatgttccagcccaagaacagcaagagcctgctgctgcgggcccactgccagaccagtggctggtccctgaccgagcaggacccctacaataacatcgtcaggaccgccatcgaggccatggcggccgtgttcggaggcacgcagagcctccacaccaacagcttcgacgaggccctgggcctgcccacggtgaagagcgcccggatcgcccgcaacacccagatcatcatccaggaggagagcggcatccccaaggtggccgacccctggggcggtagctacatgatggagtgcctgaccaacgacgtctacgatgcggccctcaagctgatcaacgagatcgaggagatgggcgggatggccaaagccgtcgccgagggaatcccgaagctgaggatagaggagtgcgccgcgaggcgccaggccaggatcgattccggctccgaggtgatcgtgggcgtgaacaagtaccagctcgagaaggaggacgccgtggaggtgctggccatagacaacacctccgtgcggaaccgccagatcgagaaactgaagaagatcaagtccagccgcgaccaggccctggccgagcggtgtctggccgcgctcactgagtgcgccgccagcggcgacggaaacatactggccctggccgtggacgcctcccgcgccaggtgcacggtgggagagatcaccgacgccctgaagaaggtgttcggggaacacaaggccaacgatcggatggtctccggcgcctaccgacaggagttcggcgaaagcaaggagattaccagcgccatcaagcgggtgcacaagtttatggagagggagggccggaggccccggctgctcgtggccaagatgggccaggatggacacgatcgaggggccaaagtcatcgccaccgggttcgccgacctcggcttcgacgtggacatcgggccgctgttccagacccccagggaggtcgcccagcaggccgtggatgccgacgtgcacgccgtcggcgtttccaccctggccgccggccataagaccctggtgcccgagctgatcaaggagctgaactcactcggccggcccgacatcctcgtgatgtgcgggggcgtcatacccccgcaggactacgagtttctgttcgaggtgggggtttccaacgtgttcggcccgggcacccggatccccaaagccgccgtgcaggtgctcgatgacattgaaaagtgtctggagaagaaacagcaatccgtg

SEQ ID NO: 765 - DNA, 2250 bp, Artificial Sequence
  Codon optimized sequence that encodes an MCM polypeptide with the I671V mutation
atgctgagggccaagaaccagctgttcctgctgtctccccactatctaaggcaggtcaaggagagcagcggcagcaggctgatccagcagcgtcttctgcaccagcagcagccactgcatcccgagtgggccgccctggccaagaagcagctgaagggcaagaaccccgaggacctgatctggcacacccctgagggcatcagcatcaagcccctgtactcaaaacgcgacaccatggacctgcccgaagagctgcccggggtgaagcccttcacccggggcccataccccacgatgtacacctttaggccgtggaccatcaggcagtatgccggcttctcaaccgtggaggagagcaacaagttttacaaagacaacatcaaggccggccagcagggcctgtccgtggccttcgacctggccacacaccgggggtacgacagcgacaacccccgcgtgcgtggtgatgtcgggatggccggagtggccatagacacggtggaggacaccaagatcctgttcgacggcatccccctggaaaagatgagcgtgagcatgaccatgaacggcgccgtcatccccgtgctggcaaacttcatcgtgaccggcgaggagcagggcgtgccgaaggagaagctgaccggcaccatccagaacgacatcctgaaggaatttatggtcaggaatacctacatcttcccacccgagccctccatgaagatcatcgccgacatcttcgaatacaccgccaagcatatgcccaaattcaatagcatcagcatcagcggttaccacatgcaggaagccggcgcggacgccatcctggagctggcctacaccctggcagatggcctggagtactcccgaacgggactgcaggccgggctgaccatcgacgagttcgcccccaggctgagcttcttttggggcatcggcatgaacttctacatggaaatcgccaaaatgcgtgcgggcaggaggctgtgggcccatctgatcgagaagatgttccagcccaagaacagcaagtccctcctgctcagggcccactgtcaaaccagcgggtggtcgctgaccgagcaggacccctacaacaacatcgtccggaccgccattgaggcgatggccgccgtgtttgggggcacccagtccctgcacaccaacagcttcgacgaggccctggggctgccaaccgtcaagagcgcccggatcgcgaggaacacccagatcataatccaggaggagtccggcatccccaaggtcgccgacccatggggcggctcctacatgatggagtgcctcaccaacgacgtgtacgacgccgccctgaagctgatcaacgaaatcgaggagatgggcggaatggccaaagccgtggccgagggcatcccgaagctgaggattgaggagtgcgccgccaggcggcaggcccggatcgacagcggcagcgaggtgatcgtgggcgtgaacaagtatcagctggagaaagaggacgcggtggaggtcctggccatcgacaatacctcggtgaggaaccgccagatcgagaagctgaaaaagatcaagtcctccagggaccaggccctggccgagcgatgcctcgccgccctgaccgagtgcgccgcctccggcgacgggaacatcctggccctggcggtggacgccagccgggccaggtgtaccgtgggcgagatcaccgacgccctgaagaaggtgttcggcgagcataaggccaacgatcgcatggtcagcggcgcctacaggcaggagttcggagagagcaaggagattaccagcgccatcaagagggtgcacaagttcatggaacgggaggggaggcggcccaggctgcttgtggcgaagatgggccaggatggccacgacaggggcgccaaggtgatcgccaccggcttcgccgacctggggttcgatgtggacatcggacccctgtttcagacccccagggaggtggcccaacaggctgtggacgccgacgtgcacgccgtcggcgtctccaccctggccgccggacacaagaccctggtgcccgagctgatcaaagagctgaacagcctggggaggccggatatcctggtgatgtgcggcggggtcatccccccccaagactacgagttcctgttcgaagtgggagtcagcaacgtcttcgggcccggcacccggatcccgaaggccgccgtccaggtgctggacgacatcgagaagtgcctggagaagaaacagcagagcgtg

SEQ ID NO: 766 - DNA, 2506 bp, Artificial Sequence
  mRNAs encoding human MCM
tcaagcttttggaccctcgtacagaagctaatacgactcactatagggaaataagagagaaaagaagagtaagaagaaatataagagccaccatgctgcgggccaagaaccagctgttcctgctgagcccccactacctgcggcaggtgaaggagagcagcggcagccggctgatccagcagcggctgctgcaccagcagcagcccctgcaccccgagtgggccgccctggccaagaagcagctgaagggcaagaaccccgaggacctgatctggcacacccccgagggcatcagcatcaagcccctgtacagcaagcgggacaccatggacctgcccgaggagctgcccggcgtgaagcccttcacccggggcccctaccccaccatgtacaccttccggccctggaccatccggcagtacgccggcttcagcaccgtggaggagagcaacaagttctacaaggacaacatcaaggccggccagcagggcctgagcgtggccttcgacctggccacccaccggggctacgacagcgacaacccccgggtgcggggcgacgtgggcatggccggcgtggccatcgacaccgtggaggacaccaagatcctgttcgacggcatccccctggagaagatgagcgtgagcatgaccatgaacggcgccgtgatccccgtgctggccaacttcatcgtgaccggcgaggagcagggcgtgcccaaggagaagctgaccggcaccatccagaacgacatcctgaaggagttcatggtgcggaacacctacatcttcccccccgagcccagcatgaagatcatcgccgacatcttcgagtacaccgccaagcacatgcccaagttcaacagcatcagcatcagcggctaccacatgcaggaggccggcgccgacgccatcctggagctggcctacaccctggccgacggcctggagtacagccggaccggcctgcaggccggcctgaccatcgacgagttcgccccccggctgagcttcttctggggcatcggcatgaacttctacatggagatcgccaagatgcgggccggccggcggctgtgggcccacctgatcgagaagatgttccagcccaagaacagcaagagcctgctgctgcgggcccactgccagaccagcggctggagcctgaccgagcaggacccctacaacaacatcgtgcggaccgccatcgaggccatggccgccgtgttcggcggcacccagagcctgcacaccaacagcttcgacgaggccctgggcctgcccaccgtgaagagcgcccggatcgcccggaacacccagatcatcatccaggaggagagcggcatccccaaggtggccgacccctggggcggcagctacatgatggagtgcctgaccaacgacgtgtacgacgccgccctgaagctgatcaacgagatcgaggagatgggcggcatggccaaggccgtggccgagggcatccccaagctgcggatcgaggagtgcgccgcccggcggcaggcccggatcgacagcggcagcgaggtgatcgtgggcgtgaacaagtaccagctggagaaggaggacgccgtggaggtgctggccatcgacaacaccagcgtgcggaaccggcagatcgagaagctgaagaagatcaagagcagccgggaccaggccctggccgagcggtgcctggccgccctgaccgagtgcgccgccagcggcgacggcaacatcctggccctggccgtggacgccagccgggcccggtgcaccgtgggcgagatcaccgacgccctgaagaaggtgttcggcgagcacaaggccaacgaccggatggtgagcggcgcctaccggcaggagttcggcgagagcaaggagatcaccagcgccatcaagcgggtgcacaagttcatggagcgggagggccggcggccccggctgctggtggccaagatgggccaggacggccacgaccggggcgccaaggtgatcgccaccggcttcgccgacctgggcttcgacgtggacatcggccccctgttccagaccccccgggaggtggcccagcaggccgtggacgccgacgtgcacgccgtgggcgtgagcaccctggccgccggccacaagaccctggtgcccgagctgatcaaggagctgaacagcctgggccggcccgacatcctggtgatgtgcggcggcgtgatccccccccaggactacgagttcctgttcgaggtgggcgtgagcaacgtgttcggccccggcacccggatccccaaggccgccgtgcaggtgctggacgacatcgagaagtgcctggagaagaagcagcagagcgtgtgataatagtccataaagtaggaaacactacagctggagcctcggtggccatgcttcttgccccttgggcctccccccagcccctcctccccttcctgcacccgtaccccccgcattattactcacggtacgagtggtctttgaataaagtctgagtgggcggc

SEQ ID NO: 767 - DNA, 2484 bp, Artificial Sequence
  mRNAs encoding human MCM
tcaagcttttggaccctcgtacagaagctaatacgactcactatagggaaataagagagaaaagaagagtaagaagaaatataagagccaccatgctgcgggccaagaaccagctgttcctgctgagcccccactacctgcggcaggtgaaggagagcagcggcagccggctgatccagcagcggctgctgcaccagcagcagcccctgcaccccgagtgggccgccctggccaagaagcagctgaagggcaagaaccccgaggacctgatctggcacacccccgagggcatcagcatcaagcccctgtacagcaagcgggacaccatggacctgcccgaggagctgcccggcgtgaagcccttcacccggggcccctaccccaccatgtacaccttccggccctggaccatccggcagtacgccggcttcagcaccgtggaggagagcaacaagttctacaaggacaacatcaaggccggccagcagggcctgagcgtggccttcgacctggccacccaccggggctacgacagcgacaacccccgggtgcggggcgacgtgggcatggccggcgtggccatcgacaccgtggaggacaccaagatcctgttcgacggcatccccctggagaagatgagcgtgagcatgaccatgaacggcgccgtgatccccgtgctggccaacttcatcgtgaccggcgaggagcagggcgtgcccaaggagaagctgaccggcaccatccagaacgacatcctgaaggagttcatggtgcggaacacctacatcttcccccccgagcccagcatgaagatcatcgccgacatcttcgagtacaccgccaagcacatgcccaagttcaacagcatcagcatcagcggctaccacatgcaggaggccggcgccgacgccatcctggagctggcctacaccctggccgacggcctggagtacagccggaccggcctgcaggccggcctgaccatcgacgagttcgccccccggctgagcttcttctggggcatcggcatgaacttctacatggagatcgccaagatgcgggccggccggcggctgtgggcccacctgatcgagaagatgttccagcccaagaacagcaagagcctgctgctgcgggcccactgccagaccagcggctggagcctgaccgagcaggacccctacaacaacatcgtgcggaccgccatcgaggccatggccgccgtgttcggcggcacccagagcctgcacaccaacagcttcgacgaggccctgggcctgcccaccgtgaagagcgcccggatcgcccggaacacccagatcatcatccaggaggagagcggcatccccaaggtggccgacccctggggcggcagctacatgatggagtgcctgaccaacgacgtgtacgacgccgccctgaagctgatcaacgagatcgaggagatgggcggcatggccaaggccgtggccgagggcatccccaagctgcggatcgaggagtgcgccgcccggcggcaggcccggatcgacagcggcagcgaggtgatcgtgggcgtgaacaagtaccagctggagaaggaggacgccgtggaggtgctggccatcgacaacaccagcgtgcggaaccggcagatcgagaagctgaagaagatcaagagcagccgggaccaggccctggccgagcggtgcctggccgccctgaccgagtgcgccgccagcggcgacggcaacatcctggccctggccgtggacgccagccgggcccggtgcaccgtgggcgagatcaccgacgccctgaagaaggtgttcggcgagcacaaggccaacgaccggatggtgagcggcgcctaccggcaggagttcggcgagagcaaggagatcaccagcgccatcaagcgggtgcacaagttcatggagcgggagggccggcggccccggctgctggtggccaagatgggccaggacggccacgaccggggcgccaaggtgatcgccaccggcttcgccgacctgggcttcgacgtggacatcggccccctgttccagaccccccgggaggtggcccagcaggccgtggacgccgacgtgcacgccgtgggcgtgagcaccctggccgccggccacaagaccctggtgcccgagctgatcaaggagctgaacagcctgggccggcccgacatcctggtgatgtgcggcggcgtgatccccccccaggactacgagttcctgttcgaggtgggcgtgagcaacgtgttcggccccggcacccggatccccaaggccgccgtgcaggtgctggacgacatcgagaagtgcctggagaagaagcagcagagcgtgtgataataggctggagcctcggtggccatgcttcttgccccttgggcctccccccagcccctcctccccttcctgcacccgtaccccctccataaagtaggaaacactacagtggtctttgaataaagtctgagtgggcggc

SEQ ID NO: 768 - DNA, 2250 bp, Artificial Sequence; identical to SEQ ID NO: 182
  mRNAs encoding human MCM

SEQ ID NO: 769 - DNA, 2506 bp, Artificial Sequence
  mRNAs encoding human MCM
tcaagcttttggaccctcgtacagaagctaatacgactcactatagggaaataagagagaaaagaagagtaagaagaaatataagagccaccatgctgcgggccaagaaccagctgttcctgctgagccctcactacctgcggcaggtgaaggagagcagcggcagccggctgatccagcagcggctgctgcaccagcagcagcccctgcaccccgagtgggccgccctggccaagaagcagctgaagggcaagaaccccgaggacctgatctggcacacgcccgagggcatcagcatcaagcccctgtacagcaagcgggacaccatggacctgcccgaggagctgcccggcgtgaagcccttcacccggggcccctaccccaccatgtacaccttccggccctggaccatccggcagtacgccggcttcagcaccgtggaggagagcaacaagttctacaaggacaacatcaaggccggccagcagggcctgagcgtggccttcgacctggccacccaccggggctacgacagcgacaacccacgggtgcggggcgacgtgggcatggccggcgtggccatcgacaccgtggaggacaccaagatcctgttcgacggcatccctctggagaagatgagcgtgagcatgaccatgaacggcgccgtgatccccgtgctggccaacttcatcgtgaccggcgaggagcagggcgtgcccaaggagaagctgaccggcaccatccagaacgacatcctgaaggagttcatggtgcggaacacctacatcttccctcccgagcccagcatgaagatcatcgccgacatcttcgagtacaccgccaagcacatgcccaagttcaacagcatcagcatcagcggctaccacatgcaggaggccggcgccgacgccatcctggagctggcctacaccctggccgacggcctggagtacagccggaccggcctgcaggccggcctgaccatcgacgagttcgcgccccggctgagcttcttctggggcatcggcatgaacttctacatggagatcgccaagatgcgggccggccggcggctgtgggcccacctgatcgagaagatgttccagcccaagaacagcaagagcctgctgctgcgggcccactgccagaccagcggctggagcctgaccgagcaggacccctacaacaacatcgtgcggaccgccatcgaggccatggccgccgtgttcggcggcacccagagcctgcacaccaacagcttcgacgaggccctgggcctgcccaccgtgaagagcgcccggatcgcccggaacacccagatcatcatccaggaggagagcggcatccccaaggtggccgacccctggggcggcagctacatgatggagtgcctgaccaacgacgtgtacgacgccgccctgaagctgatcaacgagatcgaggagatgggcggcatggccaaggccgtggccgagggcatccccaagctgcggatcgaggagtgcgccgcccggcggcaggcccggatcgacagcggcagcgaggtgatcgtgggcgtgaacaagtaccagctggagaaggaggacgccgtggaggtgctggccatcgacaacaccagcgtgcggaaccggcagatcgagaagctgaagaagatcaagagcagccgggaccaggccctggccgagcggtgcctggccgccctgaccgagtgcgccgccagcggcgacggcaacatcctggccctggccgtggacgccagccgggcccggtgcaccgtgggcgagatcaccgacgccctgaagaaggtgttcggcgagcacaaggccaacgaccggatggtgagcggcgcctaccggcaggagttcggcgagagcaaggagatcaccagcgccatcaagcgggtgcacaagttcatggagcgggagggccggcggccccggctgctggtggccaagatgggccaggacggccacgaccggggcgccaaggtgatcgccaccggcttcgccgacctgggcttcgacgtggacatcggcccactgttccagacgccccgggaggtggcccagcaggccgtggacgccgacgtgcacgccgtgggcgtgagcaccctggccgccggccacaagaccctggtgcccgagctgatcaaggagctgaacagcctgggccggcccgacatcctggtgatgtgcggcggcgtgatcccgccccaggactacgagttcctgttcgaggtgggcgtgagcaacgtgttcggccccggcacccggatccccaaggccgccgtgcaggtgctggacgacatcgagaagtgcctggagaagaagcagcagagcgtgtgataatagtccataaagtaggaaacactacagctggagcctcggtggccatgcttcttgccccttgggcctccccccagcccctcctccccttcctgcacccgtaccccccgcattattactcacggtacgagtggtctttgaataaagtctgagtgggcggc

SEQ ID NO: 770 - DNA, 2483 bp, Artificial Sequence
  mRNAs encoding human MCM
tcaagcttttggaccctcgtacagaagctaatacgactcactatagggaaataagagagaaaagaagagtaagaagaaatataagagccaccatgctgcgggccaagaaccagctgttcctgctgagcccccactacctgcggcaggtgaaggagagcagcggcagccggctgatccagcagcgcctcctccaccagcagcagcccctccaccccgagtgggccgccctcgccaagaagcagctcaagggcaagaaccccgaggacctcatctggcacacccccgagggcatctccatcaagcccctctactccaagcgcgacaccatggacctccccgaggagctccccggcgtcaagcccttcacccgcggcccctaccccaccatgtacaccttccgcccctggaccatccgccagtacgccggcttctccaccgtcgaggagtccaacaagttctacaaggacaacatcaaggccggccagcagggcctctccgtcgccttcgacctcgccacccaccgcggctacgactccgacaacccccgcgtccgcggcgacgtcggcatggccggcgtcgccatcgacaccgtcgaggacaccaagatcctcttcgacggcatccccctcgagaagatgtccgtctccatgaccatgaacggcgccgtcatccccgtcctcgccaacttcatcgtcaccggcgaggagcagggcgtccccaaggagaagctcaccggcaccatccagaacgacatcctcaaggagttcatggtccgcaacacctacatcttcccccccgagccctccatgaagatcatcgccgacatcttcgagtacaccgccaagcacatgcccaagttcaactccatctccatctccggctaccacatgcaggaggccggcgccgacgccatcctcgagctcgcctacaccctcgccgacggcctcgagtactcccgcaccggcctccaggccggcctcaccatcgacgagttcgccccccgcctctccttcttctggggcatcggcatgaacttctacatggagatcgccaagatgcgcgccggccgccgcctctgggcccacctcatcgagaagatgttccagcccaagaactccaagtccctcctcctccgcgcccactgccagacctccggctggtccctcaccgagcaggacccctacaacaacatcgtccgcaccgccatcgaggccatggccgccgtcttcggcggcacccagtccctccacaccaactccttcgacgaggccctcggcctccccaccgtcaagtccgcccgcatcgcccgcaacacccagatcatcatccaggaggagtccggcatccccaaggtcgccgacccctggggcggctcctacatgatggagtgcctcaccaacgacgtctacgacgccgccctcaagctcatcaacgagatcgaggagatgggcggcatggccaaggccgtcgccgagggcatccccaagctccgcatcgaggagtgcgccgcccgccgccaggcccgcatcgactccggctccgaggtcatcgtcggcgtcaacaagtaccagctcgagaaggaggacgccgtcgaggtcctcgccatcgacaacacctccgtccgcaaccgccagatcgagaagctcaagaagatcaagtcctcccgcgaccaggccctcgccgagcgctgcctcgccgccctcaccgagtgcgccgcctccggcgacggcaacatcctcgccctcgccgtcgacgcctcccgcgcccgctgcaccgtcggcgagatcaccgacgccctcaagaaggtcttcggcgagcacaaggccaacgaccgcatggtctccggcgcctaccgccaggagttcggcgagtccaaggagatcacctccgccatcaagcgcgtccacaagttcatggagcgcgagggccgccgcccccgcctcctcgtcgccaagatgggccaggacggccacgaccgcggcgccaaggtcatcgccaccggcttcgccgacctcggcttcgacgtcgacatcggccccctcttccagaccccccgcgaggtcgcccagcaggccgtcgacgccgacgtccacgccgtcggcgtctccaccctcgccgccggccacaagaccctcgtccccgagctcatcaaggagctcaactccctcggccgccccgacatcctcgtcatgtgcggcggcgtcatccccccccaggactacgagttcctcttcgaggtcggcgtctccaacgtcttcggccccggcacccgcatccccaaggccgccgtccaggtcctcgacgacatcgagaagtgcctcgagaagaagcagcagtccgtctgataataggctggagcctcggtggccatgcttcttgccccttgggcctccccccagcccctcctccccttcctgcacccgtaccccccgcattattactcacggtacgagtggtctttgaataaagtctgagtgggcggc

SEQ ID NO: 771 - DNA, 2483 bp, Artificial Sequence
  mRNAs encoding human MCM
tcaagcttttggaccctcgtacagaagctaatacgactcactatagggaaataagagagaaaagaagagtaagaagaaatataagagccaccatgctgcgggcgaagaaccagctgttcctgctaagcccccactacctgcggcaagtgaaggaaagcagcggttcacggctgatccagcagcgcctcctccaccaacagcagcccctccaccccgagtgggccgccctcgccaagaagcaacttaaaggcaagaaccccgaggacctcatttggcacacgcccgagggcatctccatcaagcccctctactctaagcgcgacaccatggacctccccgaagagctccccggcgtcaagcccttcacccgtggaccctaccctaccatgtacaccttccgcccttggactatccgccagtacgctggcttttccaccgtcgaggaatccaacaaattttacaaggacaacatcaaagccggtcaacaaggcctctccgttgccttcgacctcgccacccatcgcggctacgactcggacaacccccgcgtgcgcggcgacgtcggcatggccggcgtcgccatcgacaccgtcgaagataccaagatcctcttcgacggcatcccccttgagaagatgtccgtctccatgaccatgaacggcgccgtcatccccgtactcgcaaactttattgtcaccggcgaggagcaaggcgtgcccaaagagaagctcacgggaaccatacagaacgatatcctcaaggaattcatggtccgcaatacctacatcttcccacccgagccctccatgaaaatcatcgccgacatcttcgagtacaccgccaagcacatgcccaagttcaactcaatctccatctccggctatcatatgcaggaggccggcgccgacgctatcctcgaactcgcttacaccctggctgacggcctcgagtactcccgcacaggcctccaggcaggcttgacaatcgacgagtttgcccccagactctctttcttctggggcatcggcatgaacttctacatggagatagccaaaatgcgcgccggccgccgcctctgggcccaccttattgaaaagatgtttcagcccaagaactccaaatccctcctcctccgtgcccactgccagacctcgggttggtcccttacggagcaggatccctataataacatcgtccgcaccgccatcgaggctatggccgcggtcttcggcggcacccagtccctccacaccaacagtttcgacgaggccctggggctccccaccgtcaaatccgctaggatcgcccgcaacacccaaattattattcaggaagagtccggcatcccaaaagtcgccgatccctggggcggctcctacatgatggagtgcctcaccaacgacgtctacgacgccgccctcaagctcatcaatgaaatcgaggagatgggcggcatggccaaggccgtcgctgagggcatccccaagctccgcatcgaggagtgcgctgcccgccgccaggcccggattgactccggttccgaggtcatagtcggcgtaaacaagtatcaactcgagaaggaagacgctgtcgaggtactcgccatcgacaacaccagtgtccgaaatcgccagatagaaaagctcaagaagattaagtcctcccgcgaccaggccctcgccgagcgctgcctcgccgccctcaccgagtgcgccgcatccggcgacggcaacattttagccctcgccgtcgacgcgtcccgcgcccgctgcaccgtcggcgagatcactgacgccctcaagaaggtcttcggggagcacaaggccaacgatcgcatggtttccggagcctaccgccaggagttcggagagagtaaggagattacctctgccatcaagcgagtccacaagttcatggagagggagggccgccgcccccgcctcctcgtcgccaaaatgggccaggacggccacgaccgcggcgccaaagtcatcgccactggcttcgccgacctcggattcgatgtagacattggccccctcttccaaaccccccgcgaggtggcccagcaggccgtggacgccgacgtccacgccgtcggcgtctccaccctcgccgccggccacaagaccctcgtccccgagctcattaaggagctcaactccctcgggcgcccagacatcctcgtcatgtgcggcggcgtcattcccccccaggactacgagttcttattcgaggtcggcgtcagcaacgtcttcggcccaggaacccggatacccaaagcggcggtccaggtccttgacgatatcgaaaagtgtctcgaaaaaaaacagcagtccgtctgataataggctggagcctcggtggccatgcttcttgccccttgggcctccccccagcccctcctccccttcctgcacccgtaccccccgcattattactcacggtacgagtggtctttgaataaagtctgagtgggcggc

SEQ ID NO: 772 - DNA, 2250 bp, Artificial Sequence
  Codon optimized sequence that encodes an MCM polypeptide with the I671V mutation
atgctgcgggcgaagaaccagctgttcctgctaagcccccactacctgcggcaagtgaaggaaagcagcggttcacggctgatccagcagcgcctcctccaccaacagcagcccctccaccccgagtgggccgccctcgccaagaagcaacttaaaggcaagaaccccgaggacctcatttggcacacgcccgagggcatctccatcaagcccctctactctaagcgcgacaccatggacctccccgaagagctccccggcgtcaagcccttcacccgtggaccctaccctaccatgtacaccttccgcccttggactatccgccagtacgctggcttttccaccgtcgaggaatccaacaaattttacaaggacaacatcaaagccggtcaacaaggcctctccgttgccttcgacctcgccacccatcgcggctacgactcggacaacccccgcgtgcgcggcgacgtcggcatggccggcgtcgccatcgacaccgtcgaagataccaagatcctcttcgacggcatcccccttgagaagatgtccgtctccatgaccatgaacggcgccgtcatccccgtactcgcaaactttattgtcaccggcgaggagcaaggcgtgcccaaagagaagctcacgggaaccatacagaacgatatcctcaaggaattcatggtccgcaatacctacatcttcccacccgagccctccatgaaaatcatcgccgacatcttcgagtacaccgccaagcacatgcccaagttcaactcaatctccatctccggctatcatatgcaggaggccggcgccgacgctatcctcgaactcgcttacaccctggctgacggcctcgagtactcccgcacaggcctccaggcaggcttgacaatcgacgagtttgcccccagactctctttcttctggggcatcggcatgaacttctacatggagatagccaaaatgcgcgccggccgccgcctctgggcccaccttattgaaaagatgtttcagcccaagaactccaaatccctcctcctccgtgcccactgccagacctcgggttggtcccttacggagcaggatccctataataacatcgtccgcaccgccatcgaggctatggccgcggtcttcggcggcacccagtccctccacaccaacagtttcgacgaggccctggggctccccaccgtcaaatccgctaggatcgcccgcaacacccaaattattattcaggaagagtccggcatcccaaaagtcgccgatccctggggcggctcctacatgatggagtgcctcaccaacgacgtctacgacgccgccctcaagctcatcaatgaaatcgaggagatgggcggcatggccaaggccgtcgctgagggcatccccaagctccgcatcgaggagtgcgctgcccgccgccaggcccggattgactccggttccgaggtcatagtcggcgtaaacaagtatcaactcgagaaggaagacgctgtcgaggtactcgccatcgacaacaccagtgtccgaaatcgccagatagaaaagctcaagaagattaagtcctcccgcgaccaggccctcgccgagcgctgcctcgccgccctcaccgagtgcgccgcatccggcgacggcaacattttagccctcgccgtcgacgcgtcccgcgcccgctgcaccgtcggcgagatcactgacgccctcaagaaggtcttcggggagcacaaggccaacgatcgcatggtttccggagcctaccgccaggagttcggagagagtaaggagattacctctgccatcaagcgagtccacaagttcatggagagggagggccgccgcccccgcctcctcgtcgccaaaatgggccaggacggccacgaccgcggcgccaaagtcatcgccactggcttcgccgacctcggattcgatgtagacattggccccctcttccaaaccccccgcgaggtggcccagcaggccgtggacgccgacgtccacgccgtcggcgtctccaccctcgccgccggccacaagaccctcgtccccgagctcattaaggagctcaactccctcgggcgcccagacatcctcgtcatgtgcggcggcgtcattcccccccaggactacgagttcttattcgaggtcggcgtcagcaacgtcttcggcccaggaacccggatacccaaagcggcggtccaggtccttgacgatatcgaaaagtgtctcgaaaaaaaacagcagtccgtc

SEQ ID NO: 773 - DNA, 164 bp, Artificial Sequence
  3 prime UTR
tgataatagtccataaagtaggaaacactacagctggagcctcggtggccatgcttcttgccccttgggcctccccccagcccctcctccccttcctgcacccgtaccccccgcattattactcacggtacgagtggtctttgaataaagtctgagtgggcggc

SEQ ID NO: 774 - DNA, 141 bp, Artificial Sequence
  3 prime UTR
tgataataggctggagcctcggtggccatgcttcttgccccttgggcctccccccagcccctcctccccttcctgcacccgtaccccccgcattattactcacggtacgagtggtctttgaataaagtctgagtgggcggc
